(19) United States
(12) Patent Application Publication
(10) Pub. No.: US 2009/0203892 A1
(43) Pub. Date: Aug. 13, 2009

(54) Retrotransposon Inhibition in Therapy

(75) Inventors: Enrico Garaci, Roma (IT); Paola Sinibaldi, Roma (IT); Corrado Spadafora, Roma (IT); Carmine Pittoggi, Roma (IT); Ilaria Sciamanna, Roma (IT); Cristina Mearelli, Roma (IT)

Correspondence Address: LERNER, DAVID, LITTENBERG,;KRUMHOLZ & MENTLIK, 600 SOUTH AVENUE WEST, WESTFIELD, NJ, 07090, US

(73) Assignees: ENRICO GARACI, ROMA (IT); PAOLA SINIBALDI, ROMA (IT); ISTITUTO SUPERIORE DI SANITA, ROMA (IT)

(21) Appl. No.: 11/794,554

(22) PCT Filed: Dec. 30, 2005
(86) PCT No.: PCT/EP05/14206

§ 371 Date: Jan. 14, 2008

(30) Foreign Application Priority Data
Dec. 30, 2004 (GB) 0428522.7

(51) Int. Cl. A61K 31/7105; A61K 31/711; C07H 21/02

(52) U.S. Cl. 536/24.5

(57) ABSTRACT

RNA interference is useful in the treatment of cancerous lesions, wherein the RNA recognises a portion of at least one LINE-I repeat element.

### INTRODUCTION

[0001] The present invention relates to the use of inhibitors of reverse transcriptase expression in therapy.

[0002] In his paper, Spadafora (Cytogenet Genome Res 105:346-350 (2004)) discussed endogenous, non-telomeric reverse transcriptase and its implications in embryogenesis and transformation.

[0003] More particularly, reverse transcriptase (RT) is encoded by two classes of repeated genomic elements, namely retrotransposons and endogenous retroviruses. Both of these require RT as an essential component of their machinery.

[0004] Retrotransposable elements, such as long interspersed elements (LINEs), have long been considered to be “junk DNA”, and to serve very little purpose other than as leftover DNA that is no longer required, and which has not been deleted from the genome. As long ago as 1971 (Temin, J Natl Cancer Inst 46:56-60), this position was challenged, but the art continues to consider such elements simply as “junk DNA”.

[0005] In his paper, Spadafora (supra) reviews the art and demonstrates that the expression of RT-encoding genes is generally repressed in non-pathological, terminally differentiated cells, but is active in very early embryos, germ cells, embryo and tumour tissues, all of which have a high proliferative potential. Blocking of RT in murine embryos arrested their development, and removing the blocking effect did not restart embryogenesis. In cancer cells, proliferation was markedly reduced, and differentiation noted between 48 and 72 hours.

[0006] Kuo et al (Biochem and Biophys Res Com 253:566-570 (1998)) identified a 1.7 kb LINE-1 (L1) transcript from the cDNA library of human small-cell lung cancer. They found that this repeated element was ubiquitously expressed in human tissues, both normal (fibroblast and liver) and transformed. In addition, they showed that a sense oligonucleotide, derived from this transcript and incubated with human hepatoma cells, reduced the rate of cell proliferation. The presence of this element in both normal and cancer tissues appeared to associate this repeat element with the general function of cell proliferation. Reduction in cell proliferation was explained by the authors as being a result of the silencing, or functional alteration, of genes involved in control of cell growth, due to mutation. The authors do not suggest that transformation is a reversible event.

[0007] By contrast, we have now established that inhibition of the LINE-1 family of retrotransposons is effective to inhibit or block proliferation of cancerous tissue and to stimulate differentiation thereof.

### SUMMARY OF THE INVENTION

[0008] Thus, in a first aspect, the present invention provides the use of RNA interference to inhibit unspecialised proliferation of cancerous tissue, wherein the RNA recognises a portion of at least one LINE-1 repeat element.

[0009] The present invention, in an alternative aspect, provides the use of RNA interference (RNAi) in the treatment of a cancerous lesion, wherein the RNA recognises a portion of at least one LINE-1 repeat element.

[0010] Reduction of RT expression by use of the RNAi of the invention leads to a reduction in proliferation of cancerous tissue, frequently by greater than 50%, with subsequent proliferation being largely accountable for by differentiated growth, at least in treated cells. Thus, the RNAi of the invention serves generally both to reduce proliferation of cancerous tissue, as well as to stimulate differentiation.

[0011] It will be appreciated that the RNAi of the invention is specific to LINE-1, and that use thereof avoids having to use a generic non nucleotide RT inhibitor (NNRTI), which blocks all RTs. Indeed, it is surprising that the RNAi of the invention, directed against LINE-1, serves to block or inhibit proliferation of cancerous tissue, given that LINE-1 is only a sub-group of RT-encoding elements.

[0012] Presently, only a few (around six to eight) members of the LINE-1 family are recognised as being particularly highly active, and RNAi against any one of these is envisaged by the present invention. Combination therapy using RNAi, wherein each RNA is specific for an individual LINE-1 retrotransposon, is envisaged, but it is preferred to employ RNA against a consensus sequence. The consensus sequence may be for two or more LINE-1 family members, but is preferably for the active members, and may be for more, if more are identified.

[0013] Preferably, the RNAi is short interfering RNA (siRNA) or double-stranded RNA (dsRNA).

[0014] It is also preferred that the RNA is short hairpin RNA, preferably adapted for, and preferably administered by, means of an siRNA expression vector. Suitable vectors include plasmids of retroviruses as are well known in the art and also discussed herein.

[0015] It is generally preferred that the RNA employed in the present invention has a stretch of 10 or more, such as 15, 20, 30, 40 or more nucleotides which are the direct sense equivalent of a region of transcribed LINE-1 DNA. However 21 nucleotides is particularly preferred. The transcribed LINE-1 DNA is preferably selected from a consensus region. However, it is not essential that the stretch of nucleotides be entirely faithful to the selected region of transcribed LINE-1 DNA, provided that the interfering RNA of the invention serves to bind the transcribed RNA from the LINE-1 DNA.

[0016] It is, nevertheless, particularly preferred that the stretch of RNA nucleotides from the RNAi is faithful to the corresponding stretch of transcribed DNA from the LINE-1 sequence. The RNAI preferably comprises, and more preferably consists of, a 21 nucleotide sequence which is faithful to the corresponding stretch of transcribed DNA from the LINE-1 sequence.

[0017] The RNAi of the present invention may form a looped structure, wherein the loop may be located within the stretch of nucleotides discussed above, in which case the stretch may be interrupted by the loop. This loop may take the form of dsRNA for part of its structure, and may provide a gap of 1, 2 or 3 nucleotides in the stretch of RNA. It is generally preferred that the loop result in no omissions from the stretch of RNA so that the target mRNA is bound along the selected sequence.

[0018] The RNAi of the invention may simply be a short sequence capable of binding the corresponding transcribed sequence from the LINE-1 element, or may additionally comprise one or two terminal sequences and/or an internal loop sequence.

[0019] It will be appreciated that the sequence selected within LINE-1 should be an open reading frame, and may be selected from ORF1 and ORF2 of the RT, for example. Thus it is preferred that the open reading frame encodes Reverse Transcriptase. This includes any protein having reverse transcription activity.

[0020] RNAi therapy may be administered in any convenient manner. In general, it is important to ensure that the RNAi reaches the target cells.

[0021] While the RNAi of the invention may be injected directly to the target site in any suitable vehicle, it may also be administered anchored to scaffolds or nanoparticles, for example.

[0022] More preferably, RNAi may be administered as plasmids or via retroviruses, for example. Adenoviruses and adeno-associated viral vectors may be employed to distribute the coding sequence for RNAi, preferably in the form of a plasmid. Other similar viruses and retroviruses may also be employed, as well as other such vehicles. In particular, it has been established that the efficacy of delivering the coding sequence, such as a plasmid, to the target site can be increased in the circulation if a permeation factor is employed, such as vascular endothelial growth factor (VEGF).

[0023] Another suitable means for delivery is the pSUPER RNAi system kit (www.oligoengine.com).

### BRIEF DESCRIPTION OF THE FIGURES

[0024] FIG. 1. Inhibition of proliferation by anti-RT drugs

[0025] (A). Cell growth in cultures treated with DMSO (control), nevirapine (NEV) and efavirenz (EFV). Cells were counted and re-plated every 96 h for five cycles. Cells were then cultured in inhibitor-free medium (two cycles). RT inhibitors were then re-added for two cycles. Cell counts are expressed as the % of controls, taken as 100%. Values represent pooled data from three experiments.

[0026] (B). Cell cycle profiles in the presence of RT inhibitors for four 96 h-cycles and after drug removal.

[0027] FIG. 2. RT inhibitors induce morphological differentiation in melanoma cells.

[0028] (A). A-375 cell line cultured in DMSO-(a, b, c), nevirapine-(d, e, f) or efavirenz-(g, h, i). Cultures were observed by phase-contrast microscopy after Wright Giemsa staining (left column), SEM (middle column), and confocal microscopy (right column) after alpha-tubulin (green) and PI staining of nuclei (red).

[0029] (B). Melanoma-derived TVM-A12 primary cells. DMSO-(a, b, c) and nevirapine-treated (d, e, f) cells under phase contrast (left column), SEM (middle column), and confocal microscopy (right column). Bar, 20 μm.

[0030] FIG. 3. RT inhibitors modulate gene expression in A-375 (Panel A) and PC3 (Panel B) cell lines.

[0031] RNA extracted from cells treated with DMSO (ctr), nevirapine (nev) or efavirenz (efv), and after removal of nevirapine (nev/r) or efavirenz (efv/r), was amplified by RT-PCR, blotted and hybridized with internal oligonucleotides. GAPDH was used as an internal standard.

[0032] FIG. 4. RNAi to LINE-1 induces morphological differentiation, reduces proliferation and modulates gene expression in A-375 cells.

[0033] (A). Structure of a full-length LINE-1 element. The position of the siRNA oligonucleotide is indicated. Arrowheads indicate the positions of primer pairs used for RT-PCR analysis.

[0034] (B). Phase-contrast microscopy of A-375 cultures transfected with control (CTR) and LINE-1 siRNA oligonucleotide (L1-i).

[0035] (C). Cell growth after transfection with CTR and L1-i oligonucleotides.

[0036] (D). Exemplifying gene expression patterns after semi-quantitative RT-PCR of RNA from A-375 cells transfected with CTR or L1-i oligonucleotides. Quantitative variations (expressed as the % of signal in L1-i to signal in CTR transfected cultures) represent the mean from three independent experiments; amplified products were estimated by densitometry of the bands and normalized to the GAPDH signal in the same experiment.

[0037] FIG. 5. Efavirenz reduces human tumor growth in nude mice.

[0038] The growth of tumors formed by the indicated cell lines was monitored in untreated animals (red) and in animals treated with efavirenz one day (purple) or one week (yellow) after inoculation. The two curves second from top in PC3 and H129 show the growth of PC3- and H69-derived tumors in animals treated starting one day after the inoculation but subjected to treatment discontinuation after 14 days. Curves show the mean value of tumor size in groups of five animals.

[0039] FIG. 6. Reduced tumorigenicity of PC3 cells pre-treated with efavirenz.

[0040] (A). Growth of tumors formed by untreated or efavirenz pre-treated cells injected in mice that were not treated or were post-treated with efavirenz in vivo.

[0041] (B). The outcome of PC3-derived xenografts after the indicated treatments for 30 days (n=20 animals/group).

[0042] FIG. 7. Cells infected with pS-L1 exhibit a drastic reduction of proliferation.

[0043] pS-L1 infected cells are shown as A375pS-11. The proliferation remained constant for at least 39 days. Non-infected cells (A375, FIG. 7A) maintained a high proliferation rate, and pS-infected cells (A375 pS, FIG. 7B) showed a moderate reduction of proliferation in the first few days after infection, but subsequently resumed quickly a high proliferation rate comparable to that of non-infected cells.

[0044] FIG. 8. Tumor growth was markedly reduced in mice inoculated with LINE1-interfered cells as compared controls.

[0045] Panel A, shows progression of tumor growth in mice inoculated with A375 pS and with A375 pS-L1i cells. The examples in panel B, show that tumor growth was markedly reduced in mice inoculated with LINE1-interfered cells as compared to those inoculated with control cells.

### DETAILED DESCRIPTION OF THE INVENTION

[0046] The LINE-1 elements (L1s) to which the RNAi of the present invention is directed are preferably selected in accordance with the teachings of Brouha et al (2003), which is hereby incorporated by reference.

[0047] Active L1s are preferred because if they are active, they are likely to be capable of expressing RT. Thus, the RNAi of the present invention preferably recognises or targets a portion of at least one active L1. Preferably, expression of RT is inhibited by RNAi.

[0048] It will be appreciated that the RNAi sequence used will recognise and be capable of binding to the RNA obtainable by transcription from a particular ORF comprised within the target L1, the L1 element being characterised by the fact that it also comprises the preferred sequence discussed herein.

[0049] Thus, the L1 sequence is identified by the preferred sequences of the present invention, for instance SEQ ID NO 27, its corresponding DNA sequence, or homologues thereof, as discussed elsewhere, but the L1 sequence is also preferably capable of expressing a protein, preferably RT, the expression of which is inhibited by the RNAi.

[0050] The binding of the RNAi sequence to the LINE-1 RNA is preferably under stringent conditions, such as in a buffer containing 50% formamide and 6×SSC.

[0051] It is preferred that the sequence used to characterise the L1 element is itself an ORF, part of an ORF, or comprises at least a portion of an ORF. Preferably, the L1 sequence used targeted by the RNAi is comprised within an ORF of said L1 element.

[0052] Therefore, where reference is made to a particular DNA sequence that may be preferred, it will be appreciated that this is a sequence used to identify, and is likely contained within, the larger sequence of the L1 element. As such, the identifying sequence of the L1 element need not contain an ORF, provided that the L1 element itself does contain an expressible ORF, the RNA transcribed from the ORF being capable of being bound by the RNAi directed to targeting that particular L1 element.

[0053] Thus, the RNAi preferably targets L1 elements comprising this preferred DNA sequence or its corresponding sequence, or homologues thereof.

[0054] Examples of ORFs within preferred L1 elements are the sequences corresponding to the primer sequences SEQ ID NOS. 20-25. Thus, the RNAI preferably recognises these SEQ ID NOS or corresponding sequences thereto.

| | |
|---|---|
| More specifically, for ORF 1: | |
| 5′-AGAAATGAGCAAAGCCTCCA-3′; | (SEQ ID NO. 20) |
| 5′-GCCTGGTGGTGACAAAATCT-3′; | (SEQ ID NO. 21) |
| and | |
| 5′-TAAGGGCAGCCAGAGAGAAA-3′: | (SEQ ID NO. 24) |
| for ORF-2: | |
| 5′-TCCAGCAGCACATCAAAAAG-3′; | (SEQ ID NO. 22) |
| 5′-CCAGTTTTTGCCCATTCAGT-3′; | (SEQ ID NO. 23) |
| and | |
| 5′-TGACAAACCCACAGCCAATA-3′. | (SEQ ID NO. 25) |

[0055] Accordingly, the RNA equivalents of these sequences are, for ORF1:

| | |
|---|---|
| 5′-AGAAAUGAGCAAAGCCUCCA-3′; | (SEQ ID NO. 39) |
| 5′-GCCUGGUGGUGACAAAAUCU-3′; | (SEQ ID NO. 40) |
| and | |
| 5′-UAAGGGCAGCCAGAGAGAAA-3′: | (SEQ ID NO. 41) |
| for ORF-2: | |
| 5′-UCCAGCAGCACAUCAAAAAG-3′; | (SEQ ID NO. 42) |
| 5′-CCAGUUUUUGCCCAUUCAGU-3′; | (SEQ ID NO. 43) |
| and | |
| 5′-UGACAAACCCACAGCCAAUA-3′. | (SEQ ID NO. 44) |

[0056] Thus, it is particularly preferred that the RNAi comprises at least a fragment, preferably at least 10 consecutive, more preferably 15, and most preferably 20 consecutive nucleotides from any one of SEQ ID NOS. 39-44. As discussed above, shorter stretches of said sequences, interspersed with features, such as hairpin loops, are also preferred.

[0057] For L1_{RP}, a CDS for ORF1 exists at position 907 to 1923 of SEQ ID NO. 27, encoding a protein sequence, given in SEQ NO. 45, and a CDS exists at 1987 to 5814 of SEQ ID NO. 27, encoding ORF2, the protein sequence being given in SEQ ID NO. 46. It is the protein encoded by ORF2 that is thought to have RT activity. Thus, it is preferred that the RNAi is directed to DNA comprised within positions 907 to 1923 of SEQ ID NO. 27 and/or 1987 to 5814 of SEQ ID NO. 27, and preferably capable of inhibiting expression of the proteins according to SEQ ID NO. 45 and, most preferably, SEQ ID NO. 46. Similarly, CDSs exist at positions 17717 to 18697 and 115033 to 116161 of SEQ ID NO. 32, but these are described as pseudogenes and are therefore, not preferred.

[0058] Thus, it is preferred that the RNAi comprises a stretch of RNA that corresponds to an RNA sequence encoding the proteins according to SEQ ID NO. 45 and, most preferably, SEQ ID NO. 46. The stretch may include hairpins or other features, discussed elsewhere, within it. Preferably, the RNAi consists of a 20 or 21 bp stretch of RNA that corresponds to an RNA sequence encoding the proteins according to SEQ ID NO. 45 and, most preferably, SEQ ID NO. 46. Preferably, the RNAi has sequence of SEQ ID NO. 19, or its RNA equivalent, SEQ ID NO. 47, which targets a consensus sequence in hot L1s.

[0059] In a further aspect, the invention provides such RNAi.

[0060] As described in Brouha (2003) et al, active L1s are preferably polymorphic, and preferably ‘young’ or recently formed, as the age of an L1 element or sequence determines its likely diversions. As discussed in Brouha (2003) et al, L1s with little sequence diversion were generally polymorphic in the population and were active in cultured cells. Conversely, highly diverged L1 sequences were most frequently fixed and inactive.

[0061] An active L1 is often 6 kbp in length, indicating that there is no 5′ truncation. Thus, the LINE-1 elements are preferably at least 6 kbp in length.

[0062] Preferred are the 80-100 retrotransposition-competent L1s predicted to be active in Brouha (2003) et al, in an average human being. Six of these retrotransposition-competent L1s were found to be ‘highly active L1s (hot L1s).’ Hot L1s preferably show at least ⅓ of the activity of L1_{RP}. Thus, it is particularly preferred that the L1 sequences are ‘hot L1s’, having a high biological activity in humans, and preferably show at least ⅓ of the activity of L1_{RP}.

[0063] L1_{RP} is a hot L1 and is described in Brouha et al (2003) and Hum. Mol. Genet. 8 (8), 1557-1560 (1999), available at http://hmg.oxfordjournals.org/cgi/reprint/8/8/1557, NCBI accession number AF148856, SEQ ID NO. 27. As it is preferred that the ORF's are targeted, nucleotide positions 907-1923 (ORF1) and 1987-5814 (ORF2) of SEQ ID NO. 27 are particularly preferred targets for the RNAi.

[0064] The activity relative to L1_{RP} may be measured by a suitable assay, for instance by linking the LINE-1 element to a detectable marker for expression, readily selected by the skilled person. Preferably, this may include the method used in Brouha et al (2003), an EGFP assay. The construction of an EGFP cassette and how to use this to assess activity is further described in reference number 23 from Brouha et al (2003), Haig H. Kazazian Jr et al: Nucleic Acids Research, 2000, Vol. 28, No. 6, 1418-1423. A suitable example of an L1 comprising EGFP is given in SEQ ID NO. 26, discussed below.

[0065] Without being bound by theory, it is thought that transcription is initiated from an internal promoter located within its 5 prime UTR, and the RNA is transported to the cytoplasm. The L1-encoded proteins, ORF1p and ORF2p, then act on the mRNA that encoded them, a phenomenon known as cis preference.

[0066] The resultant ribonucleoprotein particle then re-enterers the nucleus where L1 integration is thought to occur by target-primed reverse transcription. During this process, the L1 endonuclease generates a single-stranded nick in genomic DNA at the loose consensus sequence 5′-TTTTT/A-3′, exposing a 3′ OH, which is used as a primer for reverse transcription of L1 RNA by the L1 RT (reverse transcriptase).

[0067] Preferably, the LINE-1 sequence comprises the 21 base pair consensus sequence, SEQ ID NO. 19, its corresponding (antisense) DNA sequence or RNA equivalents thereof. Therefore, it is also preferred that the RNAi of the present invention comprises the RNA equivalent of this 21 base pair sequence, or the RNA equivalent of the corresponding DNA sequence to SEQ ID NO. 19, or a sequence that is capable of hybridising to it under stringent conditions, for instance 6×SSC.

[0068] It is also preferred that the sequence targeted by the RNAi is any of SEQ ID NO. 35-38, more preferably SEQ ID NO. 37 and most preferably SEQ ID NO. 35. Included in this is the corresponding DNA sequence or RNA equivalents thereof. SEQ ID NO. 35 is the 60 bp sequence targeted in Example 2, whilst SEQ ID NOS. 36-38 are longer consensus sequences, as discussed below.

[0069] The L1 sequence that is to be targeted can also share a degree of homology with any of the sequences described herein, preferably at least 70%, more preferably at least 85%, more preferably at least 95%, more preferably at least 99%, more preferably at least 99.5%, more preferably at least 99.9%, more preferably at least 99.95%, and most preferably at least 99.99%, homology. Thus, the RNAi preferably targets L1 elements comprising these preferred sequences or their corresponding sequences, or homologues thereof

[0070] Where reference is made to a particular sequence, it will be understood that this includes, where the sequence is a DNA sequence, its corresponding DNA sequence (for instance a sequence that hybridises to the aforementioned sequence, particularly under highly stringent conditions, such as 6×SSC) or RNA equivalents thereof, i.e. RNA sequences obtainable by transcription of said DNA sequences.

[0071] The LINE-1 elements (L1s) may be selected from a broad group of retrotransposable elements, providing that the element encodes RT. It is preferred that the L1s are derived from the ‘transcribed group A’ (Ta) subset of L1 elements or from the pre-Ta subset. However, the Ta subset is particularly preferred, especially the Ta-1d family.

[0072] However, it is especially preferred that the L1s are selected from the group consisting of LRE3, L1RP (NCBI accession number AF148856), and accession numbers ac004200, ac002980, al356438, al512428, ac021017, and al137845, SEQ ID NOS. 26-33, respectively. These sequences and their associated feature data are available from the NCBI website: http://www.ncbl.nim.nih.gov/entrez/query.fcgi.

[0073] With regard to SEQ ID NO. 26, the full sequence given is a synthetic construct of LRE3-EGFP, i.e. LRE3 tagged with EGFP (Enhanced Green Fluorescent Protein), together with a disrupted Dlgh2 gene (partial sequence). However, the skilled person will readily understand that it is not necessary to include the EGFP coding region at positions 1-155 nor the Dlgh2 gene portion at positions 510 to 910, and these may be replaced with ORF1 and ORF2, as present in the other L1s provided. This and further feature information is available from the NCBI website, under the accession number for SEQ ID NO 26, AY995186.

[0074] The skilled person will be able to engineer a L1 to include a detectable marker, such as EGFP, and may use SEQ ID NO. 26 as a starting point or template.

[0075] The consensus sequences for the groups of L1 elements are provided in SEQ ID NOS 36-38. SEQ ID NO 36 is the Ta-1d consensus sequence, SEQ ID NO 37 is the Hot element consensus sequence, and SEQ ID NO 38 is a broader consensus sequence for 90 active L1s. These were obtained from the ‘supporting information’ of the Brouha et al (2003) article online, available from www.pnas.org.

[0076] Therefore, it is preferred that the L1 sequence is selected from any of SEQ ID NOS. 36, 37 and 38 or its corresponding sequence or homologue. The homologue preferably shares at least 70%, more preferably at least 85%, more preferably at least 95%, more preferably at least 99%, more preferably at least 99.5%, more preferably at least 99.95%, and most preferably at least 99.99%, homology with said SEQ ID NO or its corresponding sequence.

[0077] The hot L1 consensus sequence, SEQ ID NO. 37, or its corresponding sequence or homologue is particularly preferred, due to their increased activity. The degree of homology or similarity to the hot 11 consensus is a good predictor of retrotransposition activity. Brouha et al (2003) analysed the relationship between L1 activity and nucleotide sequence, and constructed a consensus sequence (SEQ ID NO. 37 with eight of the hot L1s (LRE3, L1_{RP}, ac004200, ac002980, al356438, al512428, ac021017, and al137845). This sequence is identical to the Ta-1d consensus (SEQ ID NO. 36) except for a silent ORF1 change at position 1033 and is identical to a consensus of the 90 intact L1s (SEQ ID NO. 38), except for 12 polymorphic sites.

[0078] Brouha et al (2003) compared the L1s, first as active and inactive groups, then pairwise to the consensus of the hot elements. They analyzed the L1s in their entirety, then by region, and finally by whether differences resulted in amino acid changes. It was found that there were no nucleotide changes uniquely associated with active or inactive L1s. As expected, with some exceptions, the closer an L1 was to the hot L1 consensus, the more likely it was to be active. Taken with the above result, their data indicates that a decrease in retrotransposition activity occurs as a function of time. The ether an L1 is from the “hot” consensus sequence, the less likely it is to be active.

[0079] It is particularly preferred that the LINE-1 elements comprise a very high degree of sequence homology to the sequences given above, especially the hot L1s. The reason for this is that, as discussed in Brouha et al, the closer an L1 sequence was to a hot L1 sequence, the more likely it was to be active, although there are some exceptions. As mentioned above, it is preferred that the LINE-1 sequence or element is a hot L1 and preferably has at least ⅓ and preferably at least ⅔, more preferably 100% and most preferably greater than 100%, preferably 150% or more of the activity of L1_{RP}.

[0080] Of the especially preferred hot L1s, all are polymorphic and 3 (ac002980, ac004200, and al356438) come from the youngest Ta-1d group. In addition, one is in the Ta-1nd group (al512428), and another is a member of the younger Ta-0 sub groups (al137845). The sequences of these 5 canonical hot L1s are very similar to the consensus sequences of their respective groups or sub groups, indicating that they have retrotransposed relatively recently in human evolution. Finally, one hot L1 (ac021017) is non-canonical.

[0081] The 21 nucleotide sequence, SEQ ID No. 19, is complimentary to a corresponding sequence present within the 90 or so (around 80 to 100) active L1 retroelements, that are preferred targets of the present invention. Thus, the RNAi preferably targets L1 elements comprising this sequence or its corresponding sequence, or homologues thereof.

[0082] Whilst the link between LINE-1 and Reverse Transcriptase (RT) has been known for about thirty years, when it was made clear that RT is one of the genes encoded by LINE-1, the LINE-1 retroelements have traditionally been classified as useless and is often referred to as “junk DNA”. As such, this junk DNA was widely regarded as having no biological role. Despite this, the present inventors have surprisingly discovered that RT inhibition can antagonise tumour growth. The present inventors were the first to recognise that RNAi specifically targeted to LINE-1 sequences inhibits cell proliferation in culture and tumour growth in animal models.

[0083] Oncogene 2003, Vol. 22, PP 2750 to 2761, by Mangiacasale et al, focuses on the pharmacological RT inhibitors and makes no mention of RNAi at all. Cytogenet. Genome Res 2004, Vol. 105, PP 346 to 360 by C. Spadafora, one of the present inventors, is a review article bringing together various strands of the prior art, but does again not disclose the RNAi approach.

[0084] The RNAi is preferably double-stranded. Preferably, the double-stranded ribo-oligonucleotide is not used in the free form for cell transfection, but is preferably carried by a DNA construct encoding the specific siRNA. Preferably, the transcribed RNA forms a double-stranded palindromic structure that is further spontaneously processed by the cell “dicer” system, thus forming the siRNA molecules, for instance as taught in Brummelkamp et al, 2002. (NOTE to DMI insert this reference into the end of the reference lists.)

[0085] In an alternative aspect, it is preferred that the standard cell transfection procedure for delivery of RNAi is replaced by an appropriate delivery system of retroviral or adenoviral origin. Such viral systems are well known in the art. Preferably, the viral vector or capsid expressing the L1-targeted RNAi, preferably, siRNA, is able to specifically target tumour cells and, by infecting the tumour cells, lead to expression of the RNAi, for instance by transcription to provide the siRNA, thereby leading to the antagonism of tumour growth and the stimulation of differentiation of the tumour cells.

[0086] Although targeting or treatment of any tumour cell is envisaged, the tumour cell can preferably be selected from the group consisting of breast cancer tumours, lung cancer tumours, melanomas and prostate carcinomas. Indeed, melanomas and prostate carcinomas are particularly preferred.

[0087] Thus, it is particularly preferred that the RNAI is delivered direct to the cancerous tissue, for instance by injection or released from an implant, where appropriate. As mentioned above, it is particularly preferred that viral vectors or capsids are used, preferably comprising a DNA construct encoding the specific siRNA. In this instance, it is preferred that the viral vector or capsid is capable of expressing the DNA construct in the target tissue, i.e. the cancerous or tumour tissue. This may be by means of an appropriate tissue-specific promoter that is included in the DNA construct, and/or by means of viral capsids or vectors specific for particular tissues.

[0088] The above also applies to a plasmid comprising polynucleotides, preferably DNA, encoding the specific siRNA. In particular, it is preferred that this plasmid comprises the suitable tissue-specific promoter or other means for tissue-specific expression of the siRNA.

[0089] In both the instances of plasmids and vectors or capsids, it is preferred that the plasmid, vector or capsid targets only cancerous tissue, again preferably in a tissue-specific manner.

[0090] In a further aspect, the present invention also provides a method of treating a patient with cancer or a tumour, the method preferably comprising methods of RNA interference, as described above. Preferably, the method comprises selecting an individual with a cancerous tissue, and using methods of RNA interference against at least one L1 element, as discussed above. Preferably, the method includes a therapeutically effective inhibition of Reversed Transcriptase (RT), sufficient to lead to inhibition or blocking of proliferation of cancerous tissue and, preferably, to stimulate differentiation of said tissue.

[0091] Whilst it is envisaged that only one line 1 element is targeted, it is preferred that multiple line 1 elements are targeted, either at the same time or sequentially, as part of a planned regimen.

[0092] In a further aspect, the present invention also provides the use of a polynucleotide sequence, preferably a DNA sequence, encoding siRNA capable of targeting or recognising a portion of at least one LINE-1 element, for use in the manufacture of a medicament for the treatment of a cancerous condition. Preferably, the medicament comprises a viral capsid or vector, which in turn comprises the polynucleotide.

[0093] The present invention will now be illustrated further with respect to the accompanying, non-limiting examples.

### EXAMPLE 1

### Methods

### Cell Cultures.

[0094] Human A-375 melanoma (ATCC-CRL-1619), TVM-A12 primary melanoma-derived (20), HT29 adenocarcinoma (ATCC HTB-38), H69 small cell lung carcinoma (SCLC) (ATCC HTB119), and PC3 prostate carcinoma (ATCC CRL-1435) cell lines were seeded in six-well plates at a density of 10⁴ to 5×10⁴ cells/well and cultured in DMEM or RPMI1640 medium with 10% fetal bovine serum. Nevirapine and Efavirenz were purified from commercially available Viramune (Boehringer-Ingelheim) and Sustiva (Bristol-Myers Squibb) as described (18). The drugs were made 350 and 15 μM in dimethyl sulfoxide (DMSO, Sigma-Aldrich), respectively, and added to cells 5 h after seeding; the same DMSO volume (0.2% final concentration) was added to controls. Fresh RT inhibitor-containing medium was changed every 48 h. Cells were harvested every 96 h, counted in a Burker chamber (two countings/sample) and replated at the same density.

### Cell Cycle and Cell Death Analysis.

[0095] BrdU (20 μM) was added to the cultures during the last 30 min before harvesting. Harvested cells were then treated with anti-BrdU antibody and propidium iodide (PI) and subjected to biparametric analysis of the DNA content and BrdU incorporation in a FACStar Plus flow-cytometer (Beckton-Dickinson). Cell death was assessed by microscopy after combined staining with DAPI (nuclear morphology); PI (cell permeability); and 3,3 dihexyl-oxacarbocyanine [DiOC6(3)], a fluorescent probe for mitochondrial transmembrane potential.

### Indirect Immunofluorescence and Confocal Laser Scanning Microscopy.

[0096] A-375 and TVM-A12 cells were fixed with 4% para-formaldehyde for 10 min and permeabilized in 0.2% Triton-X 100 in PBS for 5 min. Mouse monoclonal anti-bovine α-tubulin (Molecular Probes, A-11126), was revealed by Alexa Fluor 488-conjugated secondary antibody (Molecular Probes, cat. A-11001); nuclei were stained with 2 μg/ml PI in the presence of 0.1 mg/ml ribonuclease A. Samples were imaged under a confocal Leica TCS 4D microscope equipped with an argon/krypton laser (excitation and emission wavelengths: 488 nm and 510 nm for Alexa 488, and 568 nm and 590 nm for PI). Confocal sections were taken at 0.5-1 μm intervals.

### Scanning Electron Microscopy (SEM).

[0097] A-375 and TVM-A12 cells were fixed in 2.5% glutaraldehyde in 0.1 M Millonig's phosphate buffer. After washing, cells were post-fixed with 1% OsO₄ (1 h, 4° C.) in MPB and dehydrated using increasing acetone concentrations. Samples were critical-point dried using liquid CO₂ and sputter-coated with gold before examination on a Stereoscan 240 scanning electron microscope (Cambridge Instr., Cambridge, UK).

### Semiquantitative RT-PCR.

[0098] RNA extraction and treatment with RNase-free DNase I were as described (18). cDNAs were synthesized using 300 ng of RNA, oligo (dT) and the Thermoscript system (Invitrogen). 1/25 of reaction mixtures was amplified using the Platinum Taq DNA Polymerase kit (Invitrogen) and 30 pmol of oligonucleotides (MWG-Biotech, Ebersberg, Germany) in an initial step of 2 min at 94° C., followed by cycles of 30 s at 94° C., 30 s at 58-62° C., 1 min at 72° C.

[0099] Each oligo pair was used in sequential amplification series with increasing numbers (25 to 40) of cycles. PCR products were electrophoresed, transferred to membranes and hybridized for 16 h at 42 C.° with [³²P]γ-ATP end-labelled internal oligonucleotides. The intensity of the amplification signal was measured by densitometry in at least three independent experiments for each gene.

### Oligonucleotides Used for Semi-Quantitative PCR Analysis Forward, F; Reverse, R) and Internal Probes (INT) for Hybridization

C-myc PCR product size, 633 bp;

| | | |
|---|---|---|
| F, | 5′-gtcacacccttctcccttcg-3′; | (SEQ ID NO. 1) |
| R, | 5′-tgtgctgatgtgtggagacg-3′; | (SEQ ID NO. 2) |
| INT, | 5′-agagaagctggcctcctacc-3′. | (SEQ ID NO. 3). |

Bcl2 PCR product size, 459 bp;

| | | |
|---|---|---|
| F, | 5′-ggtgccacctgtggtccacctg-3′; | (SEQ ID NO. 4) |
| R, | 5′-cttcacttgtggcccagatagg-3′; | (SEQ ID NO. 5) |
| INT, | 5′-ctgaagagctcctccaccac-3′. | (SEQ ID NO. 6) |

E-cadherin PCR product size, 732 bp;

| | | |
|---|---|---|
| F, | 5′-ctcctctcctggcctcagaa-3′; | (SEQ ID NO. 7) |
| R, | 5′-tactgctgcttggcctcaaa-3′; | (SEQ ID NO. 8) |
| INT | 5′-gaacgcattgccacatacac-3′. | (SEQ ID NO. 9) |

PSA PCR product size, 584 bp;

| | | |
|---|---|---|
| F, | 5′-ttgtcttcctcaccctgtcc-3′; | (SEQ ID NO. 10) |
| R, | 5′-agcacacagcatgaacttgg-3′; | (SEQ ID NO. 11) |
| INT, | 5′-ccacacccgctctacgatat-3′. | (SEQ ID NO. 12) |

Ccnd1 PCR product size, 690 bp;

| | | |
|---|---|---|
| F, | 5′-ccctcggtgtcctacttcaa-3′; | (SEQ ID NO. 13) |
| R, | 5′-tcctcctcttcctcctcctc-3′; | (SEQ ID NO. 14) |
| INT | 5′-cgcacgatttcattgaacac-3′. | (SEQ ID NO. 15) |

Gapdh PCR product size, 590 bp;

| | | |
|---|---|---|
| F, | 5′-aggggtctacatggcaactg-3′; | (SEQ ID NO. 16) |
| R, | 5′-acccagaagactgtggatgg-3′; | (SEQ ID NO. 17) |
| INT, | 5′-gtcagtggtggacctgacct-3′. | (SEQ ID NO. 18) |

### RNA Interference to LINE-1.

[0101] A 21-nt double-stranded siRNA oligonucleotide (L1-I) (5′-AAGAGCAACTCCAAGACACAT-3′, SEQ ID NO. 19) was designed to target the consensus sequence of the highly active LINE-1 elements described by Bruha et al. (21). Specifically, the following sequences were targeted:
[0102] i) eight hot L1s (LRE3 (SEQ ID NO. 26), L1RP (SEQ ID NO. 27), ac004200 (SEQ ID NO. 28), ac002980 (SEQ ID NO. 29), al356438 (SEQ ID NO. 30), al512428 (SEQ ID NO. 31), ac021017 (SEQ ID NO. 32), al1378459 (SEQ ID NO. 33));
[0103] ii) the Ta-1d family; and
[0104] iii) 90 full length L1 elements. For control, cells were transfected with a non-specific siRNA (SEQ ID NO 34) that was 3′-fluorescein modified to monitor the transfection efficiency.

[0105] siRNA oligonucleotides were synthesized by QIAGEN USA. Transfections were performed in A-375 cells using RNAiFect Transfection Reagent (QIAGEN cat. 301605) in 24-well plates adding 1, 5 μg siRNA per well. Cells were counted 48 and 72 h after transfection, and cell morphology was recorded under an Olympus CK30 inverted microscope equipped with an Olympus CAMEDIA digital camera. About 80% of cells were transfected after 24 h, as determined by fluorescence microscopy.

[0106] LINE-1 expression was analyzed by RT-PCR 48 h after transfection using specific pairs of primers for LINE-1 ORF-1 and ORF-2:

| | |
|---|---|
| ORF-1: | |
| F, 5′-AGAAATGAGCAAAGCCTCCA-3′; | (SEQ ID NO. 20) |
| R, 5′-GCCTGGTGGTGACAAAATCT-3′ | (SEQ ID NO. 21) |
| ORF-2: | |
| F, 5′-TCCAGCAGCACATCAAAAAG-3′; | (SEQ ID NO. 22) |
| R 5′-CCAGTTTTTGCCCATTCAGT-3′. | (SEQ ID NO. 23) |

[0107] RNA extraction and RT-PCR conditions were as described herein, except that the annealing T° C. was 54° C. and amplification was carried out through 23 cycles. Internal oligonucleotides for Southern analysis were: 5′-TAAGGGCAGCCAGAGAGAAA-3′ (ORF-1, SEQ ID NO. 24) and 5′-TGACAAACCCACAGCCAATA-3′ (ORF-2, SEQ ID NO. 25).

### Tumor Xenografts and Treatment of Animals.

[0108] Five-week old athymic nude mice (Harlan, Italy), kept in accordance with the European Union guidelines, were inoculated sub-cutaneously with A-375 melanoma (4×10⁶), H-69 (10⁷), PC3 (2×10⁶) and HT-29 (10⁶) cells in 100 μl PBS. Mice were sub-cutaneously injected daily five days a week with Efavirenz (20 mg/kg) using a 4 mg/ml stock in DMSO freshly diluted 1:1 with physiological solution. Controls were injected with 50% DMSO. Treatment started one day or one week after tumor implant, and, in some experiments, was discontinued after 14 days. Tumor growth was monitored every other day by caliper measurements; volumes were calculated using the formula:

length×width×height×0.52 (22).

### Results

### RNA Interference (RNAi) Targeted Against RT-Encoding LINE-1 Families Reduces Proliferation and Promotes Differentiation in Melanoma Cells

[0109] We wanted to ascertain unambiguously whether the reduced growth rate and induction of differentiation observed in response to pharmaceutical RT inhibitors, as discussed below, are actually attributable to the specific inhibition of cellular RTs. To address this, RNAi experiments were designed to specifically target LINE-1 elements subfamilies that are known to be most abundantly expressed in human cells (21, and the targeted sequences described in the corresponding section of the Methods, above).

[0110] A double-stranded RNA oligonucleotide homologous to LINE-1 ORF1 (FIG. 4, panel A) was transfected in A-375 cells. 48-72 hours after transfection, a typical differentiated morphology (panel B) was induced. Concomitantly, proliferation decreased by about 70% (panel C) compared to cells transfected with non-specific oligonucleotide. These results are comparable to those obtained with pharmacological RT inhibition. By semi-quantitative RT-PCR analysis, expression of both ORF1 and ORF2 was reduced by almost 80% compared to cells transfected with non-specific oligonucleotide (panel D). Furthermore, RNAi to LINE-1 elements induced down-regulation of expression of the c-myc and cyclin-D1 genes, but not of GAPDH, as seen in response to RT inhibitory drugs.

### RT Inhibitors Reversibly Reduce Cell Proliferation

[0111] We also investigated the response of human transformed cell lines to prolonged exposure to two widely used RT inhibitors, i.e. nevirapine and efavirenz. Cultures from A-375 melanoma, PC3 prostate carcinoma and TVM-A12 primary melanoma-derived cell lines were passaged, counted and replated every 96 h with continuous drug re-addition for at least 20 days (five 96 h-cycles). As shown in FIG. 1A, both inhibitors effectively reduce cell growth in all cell lines, with a stable inhibitory effect during prolonged exposure. Growth inhibition was reversible: when RT inhibitors were removed, all cell lines resumed proliferation at a comparable rate to controls within one or two 96 h-cycles. Re-addition of the drugs inhibited again proliferation in all cell lines. Thus, the reduction of cell growth associated with RT inhibition is not inherited as a permanent change through cell division.

[0112] To elucidate the basis of reduced proliferation, we investigated whether either RT inhibitor induced cell death in A-375 or PC3 cell lines. Combined staining with PI to reveal permeable necrotic cells, DAPI to visualize apoptotic nuclei, and DiOC6(3) to monitor the loss of mitochondrial transmembrane potential, revealed no significant induction of cell death by either RT inhibitor; what low ratio was recorded (15% at most after 72 h of exposure to either drug) was largely accounted for by apoptosis (data not shown). Thus, neither drug has significant non-specific toxicity, suggesting that reduced cell growth rather reflects the induction of cell cycle delay.

[0113] To assess this, we employed biparametric FACS analysis to measure the DNA content (revealed by PI) and DNA replication (by BrdU incorporation) after four 96 h-cycles of exposure to RT inhibitors. The cell cycle profile was significantly altered in anti-RT treated cultures, showing an increased proportion of BrdU-negative cells with a G0/G1 content that was especially pronounced in A-375 cell cultures (FIG. 1B). Removal of the drugs re-established the original cell cycle profile and abolished the G1 delay.

### Nevirapine Induces Morphological Differentiation, and Expression of Differentiation and Proliferation Genes, in Transformed Cell Lines

[0114] Since melanomas are resistant to most therapeutic treatments, it was relevant to determine whether RT inhibitors induced differentiation concomitant with reduced cell growth. We first examined A-375 melanoma cells, which can acquire a typical dendritic-like phenotype in response to certain inducers of differentiation (23). As shown in FIG. 2A, morphological differentiation, revealed by cell shape, dendritic-like extensions and increased adhesion, became evident within four-five days of exposure to nevirapine (d) or efavirenz (g), compared to DMSO-treated controls (a). By scanning electron microscopy (SEM), A-375 cells cultured with nevirapine (e) and efavirenz (h) become flattened compared to untreated controls (b) and exhibit elongated dendritic extensions that adhere tightly to the substrate. Confocal microscopy after α-tubulin immunostaining further revealed that microtubule arrays are reorganized throughout the length of outgrowing dendrites in RT-inhibited cells (f-i), different from controls (c), in which short microtubules concentrate around the nucleating centers.

[0115] A similar response was observed in primary TVM-A12 cells derived from melanoma after nevirapine treatment (FIG. 2B): untreated cells have a spindle-shaped morphology by phase contrast (a) and SEM (b); nevirapine-treated TVM-A12 cells formed instead typical branched dendrites (d-e) and displayed well-organized, elongated microtubule arrays (f), compared to untreated cells (c).

[0116] The induction of morphological differentiation suggests that critical regulatory genes are modulated in response to the RT inhibitory treatment. This was investigated in semiquantitative RT-PCR analysis of cultures treated with DMSO only, or nevirapine or efavirenz for four cycles. In A-375 melanoma cells, we focussed on a set of four genes: the E-cadherin gene, involved in cell-cell adhesion and expressed in differentiated but not in tumor cells (24); and the c-myc, bcl-2 (25) and cyclin D1 (26) genes, which are directly implicated in melanoma cell proliferation and tumor growth.

[0117] As shown in FIG. 3A, we found the E-cadherin gene is markedly up-regulated in RT-inhibited A-375 cultures compared to controls; in contrast, c-myc, bcl-2 and cyclin D1 genes are down-regulated. One exception was recorded for efavirenz, which failed to down-regulate cyclin D1 expression. We also analysed PC3 prostate carcinoma cells and selected two marker genes of the differentiated prostatic epithelia, i.e. the prostate-specific antigen PSA (27) and androgen receptor (AR) (28) genes. Neither of these genes is expressed in untreated cultures, yet both genes were induced in response to RT inhibitors (FIG. 3B). Again, the expression of all genes returned to the original level when the inhibitors were removed. Thus, RT inhibitory drugs yield the reprogramming of expression of critical genes in transformed cells, consistent with the induction of differentiation, yet this reprogramming is reversible and is abolished when RT-inhibition is released.

### RT Inhibitors Reduce the Growth of Human Tumor Xenografts in Athymic Nude Mice

[0118] Since critical features of transformed cells, including proliferation and differentiation, are modulated by RT inhibition, we tested the ability of RT inhibitors to antagonize tumor growth in vivo.

[0119] Tumorigenic cell lines selected for these experiments include A-375 and PC3 lines, as well as HT29 colon and H69 small cell lung carcinoma lines, which also showed reduced cell growth in response to RT inhibitors (19, and data not shown). Cells were inoculated subcutaneously in the limb of athymic nude mice. Animals were then subjected to treatment with efavirenz, because this drug had shown a higher in vivo effectiveness than nevirapine in preliminary assays. The optimal dose (20 mg/kg body weight) was determined in dose-response experiments testing 4 to 40 mg/kg of the drug.

[0120] The efavirenz treatment proved safe in all animal groups, with no animal death or explicit signs of toxicity in any of the groups—though the group treated with 40 mg/kg showed a significant decrease of body weight in more than 60% of animals. FIG. 5 shows the recorded curves of tumor growth in mice untreated (red) or treated with efavirenz, starting one day (purple), or one week (yellow), after tumor inoculation.

[0121] Tumor growth was markedly reduced in treated compared to untreated animals for all xenograft types, and tumor progression was antagonized with comparable effectiveness regardless of the timing of the treatment start, despite of differences in the initial tumor size. The growth curves of PC3- and HT29-derived tumors in animals treated from day one after inoculation, but subjected to treatment discontinuation after day 15 (green curves), demonstrate that RT-dependent inhibition of tumor growth is reversible in vivo.

### Efavirenz-Treated PC3 Cells Exhibit Reduced Tumorigenicity In Vivo

[0122] We also investigated whether pretreatment of transformed cells with efavirenz would modify the tumorigenic potential of derived xenografts. PC3 prostate cancer cells were cultured with 20 μM efavirenz for two 96 h-cycles, a time that was sufficient for induction of the PSA and AR genes (FIG. 3B), and subsequently inoculated in nude mice.

[0123] Untreated cells were inoculated in parallel batches of animals. Efavirenz-pretreated, or untreated, PC3 cell xenografts were then either continuously treated with efavirenz in vivo or were left untreated. As shown in FIG. 6A, untreated PC3 cells develop aggressive tumors in all animals. In contrast, efavirenz-pretreated PC3 cells showed a reduced ability to form tumors in vivo and xenografts grew more slowly. As summarized in FIG. 6 B, efavirenz-pretreated PC3 cells developed slowly-growing xenografts in 65% of the inoculated animals, compared to 100% using untreated cells. Moreover, only 40% of the animals inoculated with pretreated cells and further treated with efavirenz in vivo developed a tumor at all, and in that case the growth curve was flat. Thus, efavirenz attenuates the tumorigenic potential of transformed cells.

### Discussion

[0124] This work highlight three features of the human genome that have implications for cancer: first, LINE-1 elements are identified as active components of a mechanism involved in control of cell differentiation and proliferation; second, RNAi-dependent inactivation of LINE-1 elements, or pharmacological inhibition of the endogenous RT activity which they encode, can restore control of these traits in transformed cells; third, inhibitors of RT reduce tumor growth in animal models in vivo.

[0125] The RT inhibitor drugs used in this work, nevirapine and efavirenz, share a common mechanism of action by binding the hydrophobic pocket in the p66 subunit of RT enzymes (29,30). Though being designed to target the HIV-encoded RT, both inhibit the enzymatic activity of the endogenous RT in non-infected cells in vitro (19). We have now shown that both drugs reduce proliferation of transformed cells, largely independent on cell death, but associated with G1 delay or arrest. Concomitant with this, RT inhibitors induce morphological differentiation of transformed cells. The induction of differentiation is rapid, different from the phenotypic changes elicited by inhibitors of the telomerase-associated RT (TERT), which require long treatment times (120 days) (31). Furthermore, we did not observe the reorganization of actin stress fibers or focal adhesion sites typical of senescent cells. The absence of senescence-specific modifications, and the rapid induction of differentiation, indicate that the RT inhibitors used here do not target TERT and induce a low-proliferating differentiated phenotype rather than senescence.

[0126] What was particularly surprising was that the specificity of RT inhibitory effects was demonstrated in RNAi experiments targeted against a subgroup of six LINE-1 retroposons that are highly expressed in human cells, accounting for 84% of the overall retrotransposition capability (21). Remarkably, we found that RNAi reduced expression of LINE-1-derived ORF1 and ORF2 by some 80% in A-375 cells, suggesting that the biologically active LINE-1 subgroup was efficiently down-regulated. Changes induced by RNAi to RT-encoding LINE-1 elements are indistinguishable from those caused by pharmacological RT inhibitors, implicating LINE-1 in control of cell proliferation and differentiation. The similarity of the phenotypes observed using independent approaches indicates that inhibition of LINE-1 expression, or of RT activity, is sufficient to delay proliferation and promote differentiation. These observations indicate that any unknown side effect of the drugs do not contribute to the observed phenotype in a non-specific manner.

[0127] Consistent with the induction of reduced growth and differentiated morphology, we found that expression of a panel of selected genes was reprogrammed in response to RT inhibition. This indicates that RT activity can effectively modulate the expression of genes that promote the transition from highly proliferating, transformed phenotypes to low proliferating, differentiated phenotypes, suggesting that genome function is the ultimate target of pharmaceutical or RNAi-dependent inhibition of RT activity. However, changes in gene expression are not inherited through cell division, but are reversible when RT inhibition is released. The reversibility of examined features, and their dependence on the presence of inhibitory drugs, is consistent with the notion that LINE-1-encoded RT is part of an epigenetic mechanism that modulates gene expression and has a role in the molecular mechanisms underlying cell proliferation and differentiation.

[0128] An aspect of this study is in the ability of RT inhibitory drugs to reduce tumor growth in nude mice inoculated with four human xenograft models in vivo. Tumor growth was inhibited as long as the animals were supplied with RT inhibitor, yet was resumed on discontinuation of the treatment, as observed in cell lines. While this data illustrates the promising cytostatic ability of RT inhibitors in cancer treatment, it confirms an epigenetic role of endogenous RTs in tumor growth. Furthermore, in vitro pretreatment of PC3 prostate carcinoma cells with efavirenz attenuates their tumorigenicity in vivo. Thus, the activation of differentiation markers and reduced proliferation associated with RT inhibition are part of a large-scale reprogramming that can attenuate the malignant phenotype of transformed cells in vivo.

[0129] Growing data indicate that epigenetic changes can reprogram tumor cells and convert the transformed phenotype into a ‘normal’ non-pathological state (32,33). Epigenetic reprogramming can bypass the genetic alterations that originally caused the malignant transformation in a variety of tumors (32). Therefore, epigenetic regulatory factors are viewed as valuable, worth-challenging targets in tumor therapy (34). However, many tested compounds have generally proven toxic and/or chemically unstable. Nevirapine and efavirenz have been used in AIDS treatment for many years: the prospect of using these RT inhibitors in cancer therapy would have obvious advantages given their epidemiological record of generally good tolerance to continued administration. Furthermore, epidemiological evidence indicate that Kaposi's sarcoma (35) and other AIDS-related cancers (36) have a reduced incidence in patients treated with highly active antiretroviral therapy (HAART): while this is generally viewed as a reflection of the improved immune reaction in treated patients, it may also suggest a direct inhibitory effect of HAART on the endogenous RT activity in tumor cells.

[0130] At this stage, the mechanism(s) through which RT activity can instruct the cell fate remain unclear. Retroposons can contribute to heterochromatin formation in fission yeast (37). Though such a mechanism has not been proved in higher eukaryotes, work in our laboratory suggest that LINE-1-encoded RT is implicated in the redistribution of DNA methylation and chromatin remodeling-dependent regulation of gene expression.

[0131] In synthesis, the endogenous RT emerges as a ‘functional’ marker of the cellular machinery associated with high proliferation and loss of differentiation, and can be regarded as a novel potential target in cancer therapy. Data may be particularly encouraging for prostate cancer, where the loss of AR expression is the main cause of hormone therapy failure. Since RT inhibitors up-regulate both the AR and PSA genes, these differentiation-inducing compounds might be useful to restore androgen sensitivity in prostate cancer cells.

### EXAMPLE 2

### A) Cloning of a LINE-1-Targeted siRNA Expressing DNA Construct

[0132] The siRNA-targeted sequence was derived from a LINE-1 element known to be highly active in human cells (Brouha et al., 2003, supplementary material). The targeted sequence was 60 bp-long (from 1492 to 1552), and is represented by SEQ ID NO. 35, and was artificially synthesized as a double stranded DNA. The DNA oligonucleotide was then cloned in the commercially available vector pSuper.retro.neo+GFP (OligoEngine, USA, cat.#VEC-PRT-0006)

### B) Assembling of a Retroviral Vector

[0133] The costruct was then transfected in retrovirus-producing Phi-NX cells (obtained from ATCC), was packaged in the newly synthesized retroviral particles and spontaneously released from the cells into the medium. 48 hours after transfection, retroviral particles (called pS-L1i) were collected by centrifugation, filtered through a 0.45 micrometre Millipore filter and used for cell infection. This protocol was carried out according to manufacturer's recommendation (OligoEngine).

### C) Infection of Human Tumorigenic Cell Lines

[0134] A375 (melanoma) and PC3 (prostate carcinoma) human cell lines were infected with pS-L1i by simply mixing the supernatant of transfected cells with cell cultures and incubating for 24 hours. Transfected cells were then selected in the presence of neomicyn for 7 days. All neo-resistant cells were found to be positive for the expression of the GFP reporter gene. As a control, parallel cultures from the same cell lines were infected with retroviral particles containing the empty DNA vector (pS) devoid of the siRNA-coding sequence.

[0135] As shown in FIG. 7, cells infected with pS-L1 exhibit a drastic reduction of proliferation, which remained constant for at least 39 days. Non-infected cells maintained a high proliferation rate, and pS-infected cells showed a moderate reduction of proliferation in the first few days after infection, but subsequently resumed quickly a high proliferation rate comparable to that of non-infected cells.

[0136] In good correlation with these data, the expression of LINE-1 (both ORF1 and ORF2) was strongly down-regulated in pS-L1, but not in pS-infected cells, both at the RNA and at the protein levels, as revealed by western blot analysis using a specific antibody (data not shown).

### D) pS-L1 Infected A375 Cells have a Reduced Tumorigenicity as Determined in in Vivo Assays by Inoculation in Nude Mice

[0137] To assess whether the tumorigenic potential of pS-L1i cells was affected, 5×10⁶ A375 cells infected with pS vector, or with LINE1-knock-out pS-L1i construct, were intradermally inoculated (15 days after infection) in two group of athymic nude mice. Tumor progression was then monitored in both groups of mice: FIG. 8, panel A, shows progression of tumor growth in mice inoculated with A375 pS and with A375 pS-L1i cells. The examples in panel B, show that tumor growth was markedly reduced in mice inoculated with LINE1-interfered cells as compared to those inoculated with control cells.

[0138] Together these results support the conclusions that LINE1 gene activity contributes to proliferation of transformed cells and can be regarded as novel potential target in gene cancer therapy.

[0139] Therefore, in order to improve the exploitation of the invention by gene therapy, the following two improvements have been introduced into the described method:
[0140] i) the double-stranded ribo oligonucleotide is not used in the free form for cell transfection, but is carried by a DNA construct encoding the specific siRNA. The transcribed RNA forms a double stranded palindromic structure that is further spontaneously processed by the cell “dicer” system thus forming the siRNA molecules (Brummelkamp et al., 2002, reference 38)
[0141] ii) the standard cell transfection procedure must be replaced by an appropriate delivery system of retroviral or adenoviral origin.

[0142] In other words, the improvement of the method consists in the development of a viral vector expressing LINE-1-targeted siRNA that will be used to infect the tumor. The LINE-1-targeted siRNA expression construct will be delivered in tumorigenic cells by the viral vector, thus inhibiting the expression of endogenous LINE-1. Based on our previous experience, constitutive functional knock-out of LINE-1 obtained in this manner will strongly antagonize tumor progression.

### REFERENCES

[0143] 1. Deininger, P.-L., Moran, J.-V., Batzer, M.-A. & Kazazian, H.-H. (2003) Curr Op Gen Dev; 13, 651-8.
[0144] 2. Kiessling, A.-A., Crowell, R. & Fox, C. Proc. (1989) Acad. Natl. Sci. USA 86,
[0145] 3. Giordano, R., Magnano, A.-R., Zaccagnini, G., Pittoggi, C., Moscufo, N., Lorenzini, R. & Spadafora, C. (2000) J. Cell Biol. 148, 1107-1113
[0146] 4. Poznanski, A.-A.& Calarco, P.-G. (1991) Dev Biol. 143, 271-81.
[0147] 5. Packer, A.-I., Manova, K. & Bacharova, R.-F. (1993) Dev Biol. 157, 281-3.
[0148] 6. Mwenda, J.-M. (1993) Cell Mol. Biol. 39, 317-28.
[0149] 7. Deragon, J.-M., Sinnett, D. & Labuda, D. (1990) EMBO J. 9, 3363-8.
[0150] 8. Martin, S.-L. (1991) Mol Cell Biol. 11, 4804-7.
[0151] 9. Martin, S.-L. & Branciforte, D. (1993) Mol Cell Biol. 13, 5383-2.
[0152] 10. Hagan, C.-R; Sheffield, R.-F. & Rudin, C.-M. (2003) Nat Genet. 35, 219-20.
[0153] 11. Li, T.-H. & Schmid, C.-W. (2001) Gene. 276, 135-41.
[0154] 12. Hagan, C.-R. & Rudin, C.-M. (2002) Am J Pharmacogenomics. 2, 25-36.
[0155] 13. Khan, A.-S., Muller, J.& Sears, J.-F. (2001) Virus Res. 79, 39-45.
[0156] 14. Friedlander, A.& Patarca, R. (1999) Crit Rev Oncogenesis. 10, 129-59
[0157] 15. Ostertag, E.-M.& Kazazian, H.-H. Jr. (2001) Annu Rev Genet. 35, 501-38.
[0158] 16. Kuo, K.-W., Sheu, H.-M., Huang, Y.-S.& Leung, W.-C. (1998) Biochem Biophys Res Comm. 253, 566-70.
[0159] 17. Crone, T.-M., Schalles, S.-L., Benedict, C.-M., Pan, W., Ren, L., Loy, S.-E., Isom, H. & Clawson, G.-A. (1999) Hepathology. 29, 1114-23.
[0160] 18. Pittoggi, C., Sciamanna, I., Mattei, E., Beraldi, R., Lobascio, A.-M., Mai, A., Quaglia, M.-G., Lorenzini, R. & Spadafora, C. (2003) Mol. Reprod. Dev. 66: 225-36.
[0161] 19. Mangiacasale, R., Pittoggi, C., Sciamanna, I., Careddu, A., Mattei, E., Lorenzini, R., Travaglini, L., Landriscina, M., Barone, C., Nervi, C., Lavia, P. & Spadafora, C. (2003) Oncogene. 22, 2750-61.
[0162] 20. Melino, G., Sinibaldi Vallebona, P., D'Atri, S., Annichiarico-Petruzzelli, M., Rasi, G., Catani, M. V., Tartaglia, M. I., Vemole, P., Spagnoli, L. G., Finazzi-Agrò, A. & Garaci, E. (1993) Clin Chem Enzym Comms. 6, 105-19.
[0163] 21. Brouha, B., Schustak, J., Badge, R.-M., Lutz-Prigge, S., Farley, A.-H., Moran, J.-V. & Kazazian, H.-H., Jr. (2003) Proc Natl Acad Sci. USA 100, 5280-5285, available at: http://www.pnas.org/cgi/content/full/100/9/5280. Supporting information is available at: http://www.pnas.org/cgi/content/full/0831042100/DC1
[0164] 22. Umekita, Y., Hiipakka, R.-A., Koknotis, J.-M. & Shutsung, L. (1996) Proc Natl Acad Sci. USA 93, 11802-7.
[0165] 23. Sauane, M., Gopalkrishnan, R.-V., Sarkar, D., Su, Z.-Z., Lebedeva, I.-V., Dent, P., Pestka, S., & Fisher, P.-B. (2003) Cyt Growth Fac Rev. 14, 35-51.
[0166] 24. Hsu, M.-Y., Meier, F.-E., Nesbit, M., Hsu, J.-Y., Van Belle, P., Elder, D.-E., & Herlyn, M. (2000) Am J Pathol. 156, 1515-25.
[0167] 25. Utikal, J., Leiter, U., Udart, M., Kaskel, P., Peter, R.-U. & Krahn, G.-M. (2002) Cancer Invest. 20, 914-21.
[0168] 26. Sauter, E.-R., Yeo, U.-C., Von Stemm, A., Zhu, W., Litwin, S., Tichansky, D.-S., Pistritto, G., Nesbit, M., Pinkel, D., Herl, M. & Bastian, B.-C. (2002) Cancer Res. 62, 3200-6.
[0169] 27. Lilja, H. (2003) Urology. 62 (5, Suppl 1), 27-33.
[0170] 28. Linja, M.-J., Savinainem, K.-J., Saramaki, O.-R., Tammela, T.-L., Vessella, R.-L. & Visakorpi, T. (2001) Cancer Res. 61, 3550-5.
[0171] 29. Di Marzo Veronese, F., Copeland, T.-D., De Vico, A.-L., Rahman, R., Oroszlan, S., Gallo, R.-C. & Sarngadharan, M.-G. (1986) Science. 231, 1289-91.
[0172] 30. Ren, J., Nichols, C., Bird, L., Chamberlain, P., Weaver, K, Short, S., Stuart, D.-I. & Stammers, D.-K. (2001) J Mol Biol; 312, 795-805.
[0173] 31. Damm, K., Hemmann, U., Garin-Chesa, P., Hauel, N., Kauffmann, I., Priepke, H., Niestroj, C., Daiber, C., Enekel, B., Guilliard, B., Lauritsch, I., Muller, E., Pascolo, E., Sauter, G., Pantic, M., Martens, U. M., Wenz, C., Lingner, J., Kraut, N., Rettig, W.-J., & Schnapp, A. (2001) EMBO J. 20, 6958-68.
[0174] 32. Lotem, J.& Sachs, L. (2002) Cancer Biol. 12, 339-46.
[0175] 33. Li, L., Connelly, M.-C., Wetmore, C., Curran, T. & Morgan, J.-I. (2003) Cancer Res. 63, 2733-6.
[0176] 34. Egger, G., Liang, G., Aparicio, A. & Jones, P. A. (2004) Nature. 429, 457-63.
[0177] 35. Portsmouth, S., Stebbing, J., Gill, J., Mandalia, S., Bower, M., Nelson, M., Bower, M., & Gazzard, B. (2003) AIDS. 17, F17-F22.
[0178] 36. Tirelli, U. & Bernardi, D. (2001) Eur J Cancer. 37, 1320-4.
[0179] 37. Schramke, V. & Allshire, R. (2003) Science. 301, 1069-74.
[0180] 38. Brummelkamp T R, Bernards R and Agami R (2002) a system for stable expression of short interfering RNAs in mammalian cells. Science 296, 550-552

[0181] Additional Information on L1_{RP}:

NCBI accession number AF148856, available at:
http://www.ncbi.nlm.nih.gov/entrez/viewer.fcgi?db=nucleotide&val=5070620, and described in:
REFERENCE 39 (bases 1 to 6019)
[0182] AUTHORS Schwahn, U., Lenzner, S., Dong, J., Feil, S., Hinzmann, B., van Duijnhoven, G., Kirschner, F, Hemberger, M., Bergen, A. A., Rosenberg, T., Pinckers, A. J., Fundele, R., Rosenthal, A., Cremers, F. P., Ropers, H. H. and Berger, W.
[0183] TITLE Positional cloning of the gene for X-linked retinitis pigmentosa 2
[0184] JOURNAL Nat. Genet. 19 (4), 327-332 (1998)
[0185] PUBMED 9697692
   REFERENCE 40 (bases 1 to 6019)
[0186] AUTHORS Kimberland, M. L., Divoky, V., Prchal, J., Schwahn, U., Berger, W. and Kazazian, H. H. Jr.
[0187] TITLE Full-length human L1 insertions retain the capacity for high frequency retrotransposition in cultured cells
[0188] JOURNAL Hum. Mol. Genet. 8 (8), 1557-1560 (1999)
[0189] PUBMED 10401005
   REFERENCE 41 (bases 1 to 6019)
[0190] AUTHORS Kimberland, M. L., Kazazian, H. H. and Schwahn, U.
[0191] TITLE Direct Submission
[0192] JOURNAL Submitted (6 May 1999) Genetics, School of Medicine, University of Pennsylvania, 515 CRB, 415 Curie Blvd., Philadelphia, Pa. 19104, USA

### Important Sequences

SEQ ID NO. 47:
5′-AAGAGCAACUCCAAGACACAU-3′
SEQ ID NO. 45:
MGKKQNKTGNSKTQSASPPPKERSSSPATEQSWMENDFDELREEGFRRSN
YSELREDIQTKGKEVENFEKNLEECITRITNTEKCLKELMELKTKARELR
EECRSLRSRCDQLEERVSAMEDEMNEMKREGKFREKRIKRNEQSLQELWD
YVKRPNLRLIGVPESDVENGTKLENTLQDIIQENFPNLARQANVQIQEIQ
RTPQRYSSRRATPRHIIVRFTKVEMKEKMLRAAREKGRVTLKGKPIRLTA
DLSAETLQARREWGPIFNILKEKNFQPRISYPAKLSFISEGEIKYFIDKQ
MLRDFVITR PALKELLKEALNMERNNRYQ PLQNHAKM 338
SEQ ID NO. 46:
MTGSTSHITILTLNINGLNSAIKRHRLASWIKSQDPSVCCIQETHLTCRD
THRLKIKGWRKIYQANGKQKKAGVAILVSDKTDFKPTKIKRDKEGHYIMV
KGSIQQEELTILNIYAPNTGAPRFIKQVLSDLQRDLDSHTLIMGDFNTPL
STLDRSTRQKVNKDTQELNSALHQADLIDIYRTLHPKSTEYTFFSAPHHT
YSKIDHIVGSKALLSKCKRTEIITNYLSDHSAIKLELRIKNLTQSRSTTW
KLNNLLLNDYWVHNEMKAEIKMFFETNENKDTTYQNLWDAFKAVCRGKFI
ALNAYKRKQERSKIDTLTSQLKELEKQEQTHSKASRRQEITKIRAELKEI
ETQKTLQKINESRSWFFERINKIDRPLARLIKKKREKNQIDTIKNDKGDI
TTDPTEIQTTIREYYKHLYANKLENLEEMDTFLDTYTLPRLNQEEVESLN
RPITGSEIVAIINSLPTKKSPGPDGFTAEFYQRYKEELVPFLLKLFQSIE
KEGILPNSFYEASIILIIPKPGRDTTKKENFRPISLMNIDAKILNKILAN
RIQQHIKKLIHHDQVGFIPGMQGWFNIRKSINVIQHINRAKDKNHMIISI
DAEKAFDKIQQPFMLKTLNKLGIDGTYFKIIRAIYDKPTANIILNGQKLE
AFPLKTGTRQGCPLSPLLFNIVLEVLARAIRQEKEIKGIQLGKEEVKLSL
FADDMIVYLENPIVSAQNLLKLISNFSKVSGYKINVQKSQAFLYTNNRQT
ESQIMGELPFTIASKRIKYLGIQLTRDVKDLFKENYKPLLKEIKEETNKW
KNIPCSWVGRINIVKMAILPKVIYRFNAIPIKLPMTFFTELEKTTLKFIW
NQKRARIAKSILSQKNKAGGITLPFKLYYKATVTKTAWYWYQNRDIDQWN
RTEPSEIMPHIYNYLIFDKPEKNKQWGKDSLFNKWCWENWLAICRKLKLD
PFLTPYTKINSRWIKDLNVKYKTIKTLEENLGITIQDIGVGKDFMSKTPK
AMATKDKIDKWDLIKLKSFCTAKETTIRVNRQPTTWEKIFATYSSDKGLI
SRIYNELKQIYKKKTNNPIKKWAKDMNRHFSKEDIYAAKKHMKKCSSSLA
IREMQIKTTMRYHLTPVRAMIIKKSGNNRCWRGCGEIGTLLHCEEDCKLV
QPLWKSVWRFLRDLELEIPFDPAIPLLGIYPNEYKSCCYKDTCTRMFIAA
LFTIAKTWNQPKCPTMIDWIKKMWHIYTMEYYAAIKNDEFISFVGTWMKL
ETIILSKLSQEQKTKHRIFSLIGGN 1275
SEQ ID NO 36
(a) Ta-1d consensus
6,021 nucleotides
5′-GGGGGAGGAGCCAAGATGGCCGAATAGGAACAGCTCCGGTCTACAGC
TCCCAGCGTGAGCGACGCAGAAGACGGTGATTTCTGCATTTCCATCTGAG
GTACCGGGTTCATCTCACTAGGGAGTGCCAGACAGTGGGCGCAGGCCAGT
GTGTGTGCGCACCGTGCGCGAGCCGAAGCAGGGCGAGGCATTGCCTCACC
TGGGAAGCGCAAGGGGTCAGGGAGTTCCCTTTCCGAGTCAAAGAAAGGGG
TGACGGACGCACCTGGAAAATCGGGTCACTCCCACCCGAATATTGCGCTT
TCAGACCGGCTTAAGAAACGGCGCACCACGAGACTATATCCCACACCTGG
CTCGGAGGGTCCTACGCCCACGGAATCTCGCTGATTGCTAGCACAGCAGT
CTGAGATCAAACTGCAAGGCGGCAACGAGGCTGGGGGAGGGGCGCCCGCC
ATTGCCCAGGCTTGCTTAGGTAAACAAAGCAGCCGGGAAGCTCGAACTGG
GTGGAGCCCACCACAGCTCAAGGAGGCCTGCCTGCCTCTGTAGGCTCCAC
CTCTGGGGGCAGGGCACAGACAAACAAAAAGACAGCAGTAACCTCTGCAG
ACTTAAGTGTCCCTGTCTGACAGCTTTGAAGAGAGCAGTGGTTCTCCCAG
CACGCAGCTGGAGATCTGAGAACGGGCAGACTGCCTCCTCAAGTGGGTCC
CTGACTCCTGACCCCCGAGCAGCCTAACTGGGAGGCACCCCCCAGCAGGG
GCACACTGACACCTCACACGGCAGGGTATTCCAACAGACCTGCAGCTGAG
GGTCCTGTCTGTTAGAAGGAAAACTAACAACCAGAAAGGACATCTACACC
GAAAACCCATCTGTACATCACCATCATCAAAGACCAAAAGTAGATAAAAC
CACAAAGATGGGGAAAAAACAGAACAGAAAAACTGGAAACTCTAAAACGC
AGAGCGCCTCTCCTCCTCCAAAGGAACGCAGTTCCTCACCAGCAACAGAA
CAAAGCTGGATGGAGAATGATTTTGACGAGCTGAGAGAAGAAGGCTTCAG
ACGATCAAATTACTCTGAGCTACGGGAGGACATTCAAACCAAAGGCAAAG
AAGTTGAAAACTTTGAAAAAAATTTAGAAGAATGTATAACTAGAATAACC
AATACAGAGAAGTGCTTAAAGGAGCTGATGGAGCTGAAAACCAAGGCTCG
AGAACTACGTGAAGAATGCAGAAGCCTCAGGAGCCGATGCGATCAACTGG
AAGAAAGGGTATCAGCAATGGAAGATGAAATGAATGAAATGAAGCGAGAA
GGGAAGTTTAGAGAAAAAAGAATAAAAAGAAATGAGCAAAGCCTCCAAGA
AATATGGGACTATGTGAAAAGACCAAATCTACGTCTGATTGGTGTACCTG
AAAGTGATGTGGAGAATGGAACCAAGTTGGAAAACACTCTGCAGGATATT
ATCCAGGAGAACTTCCCCAATCTAGCAAGGCAGGCCAACGTTCAGATTCA
GGAAATACAGAGAACGCCACAAAGATACTCCTCGAGAAGAGCAACTCCAA
GACACATAATTGTCAGATTCACCAAAGTTGAAATGAAGGAAAAAATGTTA
AGGGCAGCCAGAGAGAAAGGTCGGGTTACCCTCAAGGAAAGCCCATCAGA
CTAACAGCGGATCTCTCGGCAGAAACCCTACAAGCCAGAAGAGAGTGGGG
GCCAATATTCAACATTCTTAAAGAAAAGAATTTTCAACCCAGAATTTCAT
ATCCAGCCAAACTAAGCTTCATAAGTGAAGGAGAAATAAAATACTTTATA
GACAAGCAAATGTTGAGAGATTTTGTCACCACCAGGCCTGCCCTAAAAGA
GCTCCTGAAGGAAGCGCTAAACATGGAAAGGAACAACCGGTACCAGCCGC
TGCAAAATCATGCCAAAATGTAAAGACCATCGAGACTAGGAAGAAACTGC
ATCAACTAATGAGCAAAATCACCAGCTAACATCATAATGACAGGATCAAA
TTCACACATAACAATATTAACTTTAAATATAAATGGACTAAATTCTGCAA
TTAAAAGACACAGACTGGCAAGTTGGATAAAGAGTCAAGACCCATCAGTG
TGCTGTATTCAGGAAACCCATCTCACGTGCAGAGACACACATAGGCTCAA
AATAAAAGGATGGAGGAAGATCTACCAAGCCAATGGAAAACAAAAAAAGG
CAGGGGTTGCAATCCTAGTCTCTGATAAAACAGACTTTAAACCAACAAAG
ATCAAAAGAGACAAAGAAGGCCATTACATAATGGTAAAGGGATCAATTCA
ACAAGAGGAGCTAACTATCCTAAATATTTATGCACCCAATACAGGAGCAC
CCAGATTCATAAAGCAAGTCCTCAGTGACCTACAAAGAGACTTAGACTCC
CACACATTAATAATGGGAGACTTTAACACCCCACTGTCAACATTAGACAG
ATCAACGAGACAGAAAGTCAACAAGGATACCCAGGAATTGAACTCAGCTC
TGCACCAAGCAGACCTAATAGACATCTACAGAACTCTCCACCCCAAATCA
ACAGAATATACATTTTTTTCAGCACCACACCACACCTATTCCAAAATTGA
CCACATAGTTGGAAGTAAAGCTCTCCTCAGCAAATGTAAAAGAACAGAAA
TTATAACAAACTATCTCTCAGACCACAGTGCAATCAAACTAGAACTCAGG
ATTAAGAATCTCACTCAAAGCCGCTCAACTACATGGAAACTGAACAACCT
GCTCCTGAATGACTACTGGGTACATAACGAAATGAAGGCAGAAATAAAGA
TGTTCTTTGAAACCAACGAGAACAAAGACACCACATACCAGAATCTCTGG
GACGCATTCAAAGCAGTGTGTAGAGGGAAATTTATAGCACTAAATGCCTA
CAAGAGAAAGCAGGAAAGATCCAAAATTGACACCCTAACATCACAATTAA
AAGAACTAGAAAAGCAAGAGCAAACACATTCAAAAGCTAGCAGAAGGCAA
GAAATAACTAAAATCAGAGCAGAACTGAAGGAAATAGAGACACAAAAAAC
CCTTCAAAAAATCAATGAATCCAGGAGCTGGTTTTTTGAAAGGATCAACA
AATTGATAGACCGCTAGCAAGACTAATAAAGAAAAAAAGAGAGAAGAATC
AAATAGACACAATAAAAAATGATAAAGGGGATATCACCACCGATCCCACA
GAAATACAAACTACCATCAGAGAATACTACAAACACCTCTACGCAAATAA
ACTAGAAAATCTAGAAGAAATGGATACATTCCTCGACACATACACTCTCC
CAAGACTAAACCAGGAAGAAGTTGAATCTCTGAATCGACCAATAACAGGC
TCTGAAATTGTGGCAATAATCAATAGTTTACCAACCAAAAAGAGTCCAGG
ACCAGATGGATTCACAGCCGAATTCTACCAGAGGTACAAGGAGGAACTGG
TACCATTCCTTCTGAAACTATTCCAATCAATAGAAAAAGAGGGAATCCTC
CCTAACTCATTTTATGAGGCCAGCATCATTCTGATACCAAAGCCGGGCAG
AGACACAACCAAAAAAGAGAATTTTAGACCAATATCCTTGATGAACATTG
ATGCAAAAATCCTCAATAAAATACTGGCAAACCGAATCCAGCAGCACATC
AAAAAGCTTATCCACCATGATCAAGTGGGCTTCATCCCTGGGATGCAAGG
CTGGTTCAATATACGCAAATCAATAAATGTAATCCAGCATATAAACAGAG
CCAAAGACAAAAACCACATGATTATCTCAATAGATGCAGAAAAAGCCTTT
GACAAAATTCAACAACCCTTCATGCTAAAAACCTCAATAAATTAGGTATT
GATGGGACGTATTTCAAAATAATAAGAGCTATCTATGACAAACCCACAGC
CAATATCATACTGAATGGGCAAAAACTGGAAGCATTCCCTTTGAAAACCG
GCACAAGACAGGGATGCCCTCTCTCACCGCTCCTATTCAACATAGTGTTG
GAAGTTCTGGCCAGGGCAATCAGGCAGGAGAAGGAAATAAAGGGTATTCA
ATTAGGAAAAGAGGAAGTCAAATTGTCCCTGTTTGCAGACGACATGATTG
TTTATCTAGAAAACCCCATCGTCTCAGCCCAAAATCTCCTTAAGCTGATA
AGCAACTTCAGCAAAGTCTCAGGATACAAAATCAATGTACAAAAATCACA
AGCATTCTTATACACCAACAACAGACAAACAGAGAGCCAAATCATGGGTG
AACTCCCATTCACAATTGCTCAAAGAGAATAAAATACCTAGGAATCCAAC
TTACAAGGGATGTGAAGGACCTCTTCAAGGAGAACTACAAACCACTGCTC
AAGGAAATAAAAGAGGAGACAAACAAATGGAAGAACATTCCATGCTCATG
GGTAGGAAGAATCAATATCGTGAAAATGGCCATACTGCCCAAGGTAATTT
ACAGATTCAATGCCATCCCCATCAAGCTACCAATGACTTTTCTTCACAGA
ATTGGAAAAAACTACTTTAAAGTTCATATGGAACCAAAAAAGAGCCCGCA
TTGCCAAGTCAATCCTAAGCCAAAAGAACAAAGCTGGAGGCATCACACTA
CCTGACTTCAAACTATACTACAAGGCTACAGTAACCAAAACAGCATGGTA
CTGGTACCAAAACAGAGATATAGATCAATGGAACAGAACAGAGCCCTCAG
AAATAATGCCGCATATCTACAACTATCTGATCTTTGACAAACCTGAGAAA
AACAAGCAATGGGGAAAGGATTCCCTATTAATAAATGGTGCTGGGAAAAC
TGGCTAGCCATATGTAGAAAGCTGAAACTGGATCCCTTCCTTACACCTTA
TACAAAAATCAATTCAAGATGGATTAAAGATTTAAACGTTAAACCTAAAA
CCATAAAAACCCTAGAAGAAAACCTAGGCATTACCATTCAGGACATAGGC
GTGGGCAAGGACTCATGTCCAAAACACCAAAAGCAATGGCAACAAAAGAC
AAAATTGACAAATGGGATCTAATTAAACTAAAGAGCTTCTGCACAGCAAA
AGAAACTACCATCAGAGTGAACAGGCAACCTACAACATGGGAGAAAATTT
TTGCAACCTACTCATCTGACAAAGGGCTAATATCCAGAATCTACAATGAA
CTCAAACAAATTTACAAGAAAAAAACAAACAACCCCATCAAAAAGTGGGC
GAAGGACATGAACAGACACTTCTCAAAAGAAGACATTTATGCAGCCAAAA
AACACATGAAGAAATGCTCATCATCACTGGCCATCAGAGAAATGCAAATC
AAAACCACTATGAGATATCATCTCACACCAGTTAGAATGGCAATCATTAA
AAAGTCAGGAAACAACAGGTGCTGGAGAGGATGCGGAGAAATAGGAACAC
TTTTACACTGTTGGTGGGACTGTAAACTAGTTCAACCATTGTGGAAGTCA
GTGTGGCGATTCCTCAGGGATCTAGAACTAGAAATACCATTTGACCCAGC
CATCCCATTACTGGGTATATACCCAAATGAGTATAAATCATGCTGCTATA
AAGACACATGCACACGTATGTTTATTGCGGCACTATTCACAATAGCAAAG
ACTTGGAACCAACCCAAATGTCCAACAATGATAGACTGGATTAAGAAAAT
GTGGCACATATACACCATGGAATACTATGCAGCCATAAAAAATGATGAGT
TCATATCCTTTGTAGGGACATGGATGAAATTGGAAACCATCATTCTCAGT
AAACTATCGCAAGAACAAAAAACCAAACACCGCATATTCTCACTCATAGG
TGGGAATTGAACAATGAGATCACATGGACACAGGAAGGGGAATATCACAC
TCTGGGGACTGTGGTGGGGTCGGGGGAGGGGGGAGGGATAGCATTGGGAG
ATATACCTAATGCTAGATGACACATTAGTGGGTGCAGCGCACCAGCATGG
CACATGTATACATATGTAACTAACCTGCACAATGTGCACATGTACCCTAA
AACTTAGAGTATAATAAA-3′
SEQ ID NO 37
(b) Hot element consensus
6,021 nucleotides
5′-GGGGGAGGAGCCAAGATGGCCGAATAGGAACAGCTCCGGTCTACAGC
TCCCAGCGTGAGCGACGCAGAAGACGGTGATTTCTGCATTTCCATCTGAG
GTACCGGGTTCATCTCACTAGGGAGTGCCAGACAGTGGGCGCAGGCCAGT
GTGTGTGCGCACCGTGCGCGAGCCGAAGCAGGGCGAGGCATTGCCTCACC
TGGGAAGCGCAAGGGGTCAGGGAGTTCCCTTTCCGAGTCAAAGAAAGGGG
TGACGGACGCACCTGGAAAATCGGGTCACTCCCACCCGAATATTGCGCTT
TTCAGACCGGCTTAAGAAACGGCGCACCACGAGACTATATCCCACACCTG
GCTCGGAGGGTCCTACGCCCACGGAATCTCGCTGATTGCTAGCACAGCAG
TCTGAGATCAAACTGCAAGGCGGCAACGAGGCTGGGGGAGGGGCGCCCGC
CATTGCCCAGGCTTGCTTAGGTAAACAAAGCAGCCGGGAAGCTCGAACTG
GGTGGAGCCCACCACAGCTCAAGGAGGCCTGCCTGCCTCTGTAGGCTCCA
CCTCTGGGGGCAGGGCACAGACAAACAAAAAGACAGCAGTAACCTCTGCA
GACTTAAGTGTCCCTGTCTGACAGCTTTGAAGAGAGCAGTGGTTCTCCCA
GCACGCAGCTGGAGATCTGAGAACGGGCAGACTGCCTCCTCAAGTGGGTC
GCTGACTCCTGACCCCCGAGCAGCCTAACTGGGAGGCACCCCCCAGCAGG
GGCACACTGACACCTCACACGGCAGGGTATTCCAACAGACCTGCAGCTGA
GGGTCCTGTCTGTTAGAAGGAAAACTAACAACCAGAAAGGACATCTACAC
CGAAAACCCATCTGTACATCACCATCATCAAAGACCAAAAGTAGATAAAA
CCACAAAGATGGGGAAAAAACAGAACAGAAAAACTGGAAACTCTAAAACG
CAGAGCGCCTCTCCTCCTCCAAAGGAACGCAGTTCCTCACCAGCAACAGA
ACAAAGCTGGATGGAGAATGATTTTGATGAGCTGAGAGAAGAAGGCTTCA
GACGATCAAATTACTCTGAGCTACGGGAGGACATTCAAACCAAAGGCAAA
GAAGTTGAAAACTTTGAAAAAAATTTAGAAGAATGTATAACTAGAATAAC
CAATACAGAGAAGTGCTTAAAGGAGCTGATGGAGCTGAAAACCAAGGCTC
GAGAACTACGTGAAGAATGCAGAAGCCTCAGGAGGCGATGCGATCAACTG
GAAGAAAGGGTATCAGCAATGGAAGATGAAATGAATGAAATGAAGCGAGA
AGGGAAGTTTAGAGAAAAAAGAATAAAAAGAAATGAGCAAAGCCTCCAAG
AAATATGGGACTATGTGAAAAGACCAAATCTACGTCTGATTGGTGTACCT
GAAAGTGATGTGGAGAATGGAACCAAGTTGGAAAACACTCTGCAGGATAT
TATCCAGGAGAACTTCCCCAATCTAGCAAGGCAGGCCAACGTTCAGATTC
AGGAAATACAGAGAACGCCACAAAGATACTCCTCGAGAAGAGCAACTCCA
AGACACATAATTGTCAGATTCACCAAAGTTGAAATGAAGGAAAAAATGTT
AAGGGCAGCCAGAGAGAAAGGTCGGGTTACCCTCAAAGGAAAGCCCATCA
GACTAACAGCGGATCTGTCGGCAGAAACCCTACAAGCCAGAAGAGAGTGG
GGGCCAATATTCAACATTCTAAAGAAAAGAATTTTCAACCCAGAATTTCA
TATCCAGCCAAACTAAGCTTCATAAGTGAAGGAGAAATAAAATACTTTAT
AGACAAGCAAATGTTGAGAGATTTTGTCACCACCAGGCCTGCCCTAAAAG
AGCTCCTGAAGGAAGCGCTAAACATGGAAAGGAACAACCGGTACCAGCCG
CTGCAAAATCATGCCAAAATGTAAAGACCATCGAGACTAGGAAGAAACTG
CATCAACTAATGAGCAAAATCACCAGCTAACATCATAATGACAGGATCAA
ATTCACACATAACAATATTAACTTTAAATATAAATGGACTAAATTCTGCA
ATTAAAAGACACAGACTGGCAAGTTGGATAAAGAGTCAAGACCCATCAGT
GTGCTGTATTCAGGAAACCCATCTCACGTGCAGAGACACACATAGGCTCA
AAATAAAAGGATGGAGGAAGATCTACCAAGCCAATGGAAAACAAAAAAAG
GCAGGGGTTGCAATCCTAGTCTCTGATAAAACAGACTTTAAACCAACAAA
GATCAAAAGAGACAAAGAAGGCCATTACATAATGGTAAAGGGATCAATTC
AACAAGAGGAGCTAACTATCCTAAATATTTATGCACCCAATACAGGAGCA
CCCAGATTCATAAAGCAAGTCCTCAGTGACCTACAAAGAGACTTAGACTC
CCACACATTAATAATGGGAGACTTTAACACCCCACTGTCAACATTAGACA
GATCAACGAGACAGAAAGTCAACAAGGATACCCAGGAATTGAACTCAGCT
CTGCACCAAGCAGACCTAATAGACATCTACAGAACTCTCCACCCCAAATC
AACAGAATATACATTTTTTTCAGCACCACACCACACCTATTCCAAAATTG
ACCACATAGTTGGAAGTAAAGCTCTCCTCAGCAAATGTAAAAGAACAGAA
ATTATAACAAACTATCTCTCAGACCACAGTGCAATCAAACTAGAACTCAG
GATTAAGAATCTCACTCAAAGCCGCTCAACTACATGGAAACTGAACAACC
TGCTCCTGAATGACTACTGGGTACATAACGAAATGAAGGCAGAAATAAAG
ATGTTCTTTGAAACCAACGAGAACAAAGACACCACATACCAGAATCTCTG
GGACGCATTCAAAGCAGTGTGTAGAGGGAAATTTATAGCACTAAATGCCT
ACAAGAGAAAGCAGGAAAGATCCAAAATTGACACCCTAACATCACAATTA
AAAGAACTAGAAAAGCAAGAGCAAACACATTCAAAAGCTAGCAGAAGGCA
AGAAATAACTAAAATCAGAGCAGAACTGAAGGAAATAGAGACACAAAAAA
CCCTTCAAAAAATCAATGAATCCAGGAGCTGGTTTTTTGAAAGGATCAAC
AAAATTGATAGACCGCTAGCAAGACTAATAAAGAAAAAAAGAGAGAAGAA
TCAAATAGACACAATAAAAAATGATAAAGGGGATATCACCACCGATCCCA
CAGAAATACAAACTACCATCAGAGAATACTACAAACACCTCTACGCAAAT
AAACTAGAAAATCTAGAAGAAATGGATACATTCCTCGACACATACACTCT
CCCAAGACTAAACCAGGAAGAAGTTGAATCTCTGAATCGACCAATAACAG
GCTCTGAAATTGTGGCAATAATCAATAGTTTACCAACCAAAAAGAGTCCA
GGACCAGATGGATTCACAGCCGAATTCTACCAGAGGTACAAGGAGGAACT
GGTACCATTCCTTCTGAAACTATTCCAATCAATAGAAAAAGAGGGAATCC
TCCCTAACTCATTTTATGAGGCCAGCATCATTCTGATACCAAAGCCGGGC
AGAGACACAACCAAAAAGAGAATTTTAGACCAATATCCTTGATGAACATT
GATGCAAAAATCCTCAATAAAATACTGGCAAACCGAATCCAGCAGCACAT
CAAAAAGCTTATCCACCATGATCAAGTGGGCTTCATCCCTGGGATGCAAG
GCTGGTTCAATATACGCAAATCAATAAATGTAATCCAGCATATAAACAGA
GCCAAAGACAAAAACCACATGATTATCTCAATAGATGCAGAAAAAGCCTT
TGACAAAATTCAACAACCCTTCATGCTAAAAACTCTCAATAAATTAGGTA
TTGATGGGACGTATTTCAAAATAATAAGAGCTATCTATGACAAACCCACA
GCCAATATCATACTGAATGGGCAAAAACTGGAAGCATTCCCTTTGAAAAC
CGGCACAAGACAGGGATGCCCTCTCTCACCGCTCCTATTCAACATAGTGT
TGGAAGTTCTGGCCAGGGCAATCAGGCAGGAGAAGGAAATAAAGGGTATT
CAATTAGGAAAAGAGGAAGTCAAATTGTCCCTGTTTGCAGACGACATGAT
TGTTTATCTAGAAAACCCCATCGTCTCAGCCCAAAATCTCCTTAAGCTGA
TAAGCAACTTCAGCAAAGTCTCAGGATACAAAATCAATGTACAAAAATCA
CAAGCATTCTTATACACCAACAACAGACAAACAGAGAGCCAAATCATGGG
TGAACTCCCATTCACAATTGCTTCAAAGAGAATAAAATACCTAGGAATCC
AACTTACAAGGGATGTGAAGGACCTCTTCAAGGAGAACTACAAACCACTG
CTCAAGGAAATAAAAGAGGAGACAAACAAATGGAAGAACATTCCATGCTC
ATGGGTAGGAAGAATCAATATGGTGAAAATGGCCATACTGCCCAAGGTAA
TTTACAGATTCAATGCCATCCCCATCAAGCTACCAAGACTTTCTTCACAG
AATTGGAAAAAACTACTTTAAAGTTCATATGGAACCAAAAAAGAGCCCGC
ATTGCCAAGTCAATCCTAAGCCAAAAGAACAAAGCTGGAGGCATCACACT
ACCTGACTTCAAACTATACTACAAGGCTACAGTAACCAAAACAGCATGGT
ACTGGTACCAAAACAGAGATATAGATCAATGGAACAGAACAGAGCCCTCA
GAAATAATGCCGCATATCTACAACTATGTGATCTTTGACAAACCTGAGAA
AAACAAGCAATGGGGAAAGGATTCCCTATTTAATAAATGGTGCTGGGAAA
ACTGGCTAGCCATATGTAGAAAGCTGAAACTGGATCCCTTCCTTACACCT
TATACAAAAATCAATTCAAGATGGATTAAAGATTTAAACGTTAAACCTAA
AACCATAAAAACCCTAGAAGAAAACCTAGGCATTACCATTCAGGACATAG
GCGTGGGCAAGGACTTCATGTCCAAAACACCAAAAGCAATGGCAACAAAA
GACAAAATTGACAAATGGGATCTAATTAAACTAAAGAGCTTCTGCACAGC
AAAAGAAACTACCATCAGAGTGAACAGGCAACCTACAACATGGGAGAAAA
TTTTTGCAACCTACTCATCTGACAAAGGGCTAATATCCAGAATCTACAAT
GAACTCAAACAAATTTACAAGAAAAAAACAAACAACCCCATCAAAAAGTG
GGCGAAGGACATGAACAGACACTTCTCAAAAGAAGACATTTATGCAGCCA
AAAAACACATGAAGAAATGCTCATCATCACTGGCCATCAGAGAAATGCAA
ATCAAAACCACTATGAGATATCATCTCACACCAGTTAGAATGGCAATCAT
TAAAAAGTCAGGAAACAACAGGTGCTGGAGAGGATGCGGAGAAATAGGAA
CACTTTTACACTGTTGGTGGGACTGTAAACTAGTTCAACCATTGTGGAAG
TCAGTGTGGCGATTCCTCAGGGATCTAGAACTAGAAATACCATTTGACCC
AGCCATCCCATTACTGGGTATATACCCAAATGAGTATAAATCATGCTGCT
ATAAAGACACATGCACACGTATGTTTATTGCGGCACTATTCACAATAGCA
AAGACTTGGAACCAACCCAAATGTCCAACAATGATAGACTGGATTAAGAA
AATGTGGCACATATACACCATGGAATACTATGCAGCCATAAAAAATGATG
AGTTCATATCCTTTGTAGGGACATGGATGAAATTGGAAACCATCATTCTC
AGTAAACTATCGCAAGAACAAAAAACCAAACACCGCATATTCTCACTCAT
AGGTGGGAATTGAACAATGAGATCACATGGACACAGGAAGGGGAATATCA
CACTCTGGGGACTGTGGTGGGGTCGGGGGAGGGGGGAGGGATAGCATTGG
GAGATATACCTAATGCTAGATGACACATTAGTGGGTGCAGCGCACCAGCA
TGGCACATGTATACATATGTAACTAACCTGCACAATGTGCACATGTACCC
TAAAACTTAGAGTATAATAAA-3′
SEQ ID NO 38
(c) 90-clement consensus
6,022 nucleotides
5′-GGGGGAGGAGCCAAGATGGCCGAATAGGAACAGCTCCGGTCTACAGC
TCCCAGCGTGAGCGACGCAGAAGACGGGTGATTTCTGCATTTCCATCTGA
GGTACCGGGTTCATCTCACTAGGGAGTGCCAGACAGTGGGCGCAGGCCAG
TGTGTGTGCGCACCGTGCGCGAGCCGAAGCAGGGCGAGGCATTGCCTCAC
CTGGGAAGCGCAAGGGGTCAGGGAGTTCCCTTTCCGAGTCAAAGAAAGGG
GTGACGGACGCACCTGGAAAATCGGGTCACTCCCACCCGAATATTGCGCT
TTTCAGACCGGCTTAAGAAACGGCGCACCACGAGACTATATCCCACACCT
GGCTCAGAGGGTCCTACGCCCACGGAATCTCGCTGATTGCTAGCACAGCA
GTCTGAGATCAAACTGCAAGGCGGCAACGAGGCTGGGGGAGGGGCGCCCG
CCATTGCCCAGGCTTGCTTAGGTAAACAAAGCAGCCGGGAAGCTCGAACT
GGGTGGAGCCCACCACAGCTCAAGGAGGCCTGCCTGCCTCTGTAGGCTCC
ACCTCTGGGGGCAGGGCACAGACAAACAAAAAGACAGCAGTAACCTCTGC
AGACTTAAGTGTCCCTGTCTGACAGCTTTGAAGAGAGCAGTGGTTCTCCC
AGCACGCAGCTGGAGATCTGAGAACGGGCAGACTGCCTCCTCAAGTGGGT
CCCTGACCCCTGACCCCCGAGCAGCCTAACTGGGAGGCACCCCCCAGCAG
GGGCACACTGACACCTCACACGGCAGGGTATTCCAACAGACCTGCAGCTG
AGGGTCCTGTCTGTTAGAAGGAAAACTAACAACCAGAAAGGACATCTACA
CCGAAAACCCATCTGTACATGACCATCATCAAAGACCAAAAGTAGATAAA
ACCACAAAGATGGGGAAAAAACAGAACAGAAAAACTGGAAACTCTAAAAC
GCAGAGCGCCTCTCCTCCTCCAAAGGAACGCAGTTCCTCACCAGCAACAG
AACAAAGCTGGATGGAGAATGATTTTGACGAGCTGAGAGAAGAAGGCTTC
AGACGATCAAATTACTCTGAGCTACGGGAGGACATTCAAACCAAAGGCAA
AGAAGTTGAAAACTTTGAAAAAAATTTAGAAGAATGTATAACTAGAATAA
CCAATACAGAGAAGTGCTTAAAGGAGCTGATGGAGCTGAAAACCAAGGCT
CGAGAACTACGTGAAGAATGCAGAAGGCTCAGGAGCCGATGCGATCAACT
GGAAGAAAGGGTATCAGCAATGGAAGATGAAATGAATGAAATGAAGCGAG
AAGGGAAGTTTAGAGAAAAAAGAATAAAAAGAAATGAGCAAAGCCTCCAA
GAAATATGGGACTATGTGAAAAGACCAAATCTACGTCTGATTGGTGTACC
TGAAAGTGATGTGGAGAATGGAACCAAGTTGGAAAACACTCTGCAGGATA
TTATCCAGGAGAACTTCCCCAATCTAGCAAGGCAGGCCAACGTTCAGATT
CAGGAAATACAGAGAACGCCACAAAGATACTCCTCGAGAAGAGCAACTCC
AAGACACATAATTGTCAGATTCACCAAAGTTGAAATGAAGGAAAAAATGT
TAAGGGCAGCCAGAGAGAAAGGTCGGGTTACCCTCAAAGGAAGCCCATCA
GACTAACAGCGGATCTCTCGGCAGACCCTACAAGCCAGAAGAGAGTGGGG
GCCAATATTCAACATTCTTAAAGAAAAGAATTTTCAACCCAGAATTTCAT
ATCCAGCCAAACTAAGCTTCATAAGTGAAGGAGAAATAAAATACTTTATA
GACAAGCAAATGCTGAGAGATTTTGTCACCACCAGGCCTGCCCTAAAAGA
GCTCCTGAAGGAAGCGCTAAACATGGAAAGGAACAACCGGTACCAGCCGC
TGCAAAATCATGCCAAAATGTAAAGACCATCGAGACTAGGAAGAAACTGC
ATCAACTAATGAGCAAAATCACCAGCTAACATCATAATGACAGGATCAAA
TTCACACATAACAATATTAACTTTAAATATAAATGGACTAAATTCTGCAA
TTAAAAGACACAGACTGGCAAGTTGGATAAAGAGTCAAGACCCATCAGTG
TGCTGTATTCAGGAAACCCATCTCACGTGCAGAGACACACATAGGCTCAA
AATAAAAGGATGGAGGAAGATCTACCAAGCCAATGGAAAACAAAAAAAGG
CAGGGGTTGCAATCCTAGTCTCTGATAAAACAGACTTTAAACCAACAAAG
ATCAAAAGAGACAAAGAAGGCCATTACATAATGGTAAAGGGATCAATTCA
ACAAGAGGAGCTAACTATCCTAAATATTTATGCACCCAATACAGGAGCAC
CCAGATTCATAAAGCAAGTCCTCAGTGACCTACAAAGAGACTTAGACTCC
CACACATTAATAATGGGAGACTTTAACACCCCACTGTCAACATTAGACAG
ATCAACGAGACAGAAAGTCAACAAGGATACCCAGGAATTGAACTCAGCTC
TGCACCAAGCAGACCTAATAGACATCTACAGAACTCTCCACCCCAAATCA
ACAGAATATACATTTTTTTCAGCACCACACCACACCTATTCCAAAATTGA
CCACATAGTTGGAAGTAAAGCTCTCCTCAGCAAATGTAAAAGAACAGAAA
TTATAACAAACTATCTCTCAGACCACAGTGCAATCAAACTAGAACTCAGG
ATTAAGAATCTCACTCAAAGCCGCTCAACTACATGGAAACTGAACAACCT
GCTCCTGAATGACTACTGGGTACATAACGAAATGAAGGCAGAAATAAAGA
TGTTCTTTGAAACCAACGAGAACAAAGACACCACATACCAGAATCTCTGG
GACGCATTCAAAGCAGTGTGTAGAGGGAAATTTATAGCACTAAATGCCTA
CAAGAGAAAGCAGGAAAGATCCAAAATTGACACCCTAACATCACAATTAA
AAGAACTAGAAAAGCAAGAGCAAACACATTCAAAAGCTAGCAGAAGGCAA
GAAATAACTAAAATCAGAGCAGAACTGAAGGAAATAGAGACACAAAAAAC
CCTTCAAAAAATCAATGAATCCAGGAGCTGGTTTTTTGAAAGGATCAACA
AAATTGATAGACCGCTAGCAAGACTAATAAAGAAAAAAAGAGAGAAGAAT
CAAATAGACACAATAAAAAATGATAAAGGGGATATCACCACCGATCCCAC
AGAAATACAAACTACCATCAGAGAATACTACAAACACCTCTACGCAAATA
AACTAGAAAATCTAGAAGAAATGGATACATTCCTCGACACATACACTCTC
CCAAAGACTAAACCAGGAAGAAGTTGAATCTCTGAATAGACCAATAACAG
GCTCTGAAATTGTGGCAATAATCAATAGTTTACCAACCAAAAAGAGTCCA
GGACCAGATGGATTCACAGCCGAATTCTACCAGAGGTACAAGGAGGAACT
GGTACCATTCCTTCTGAAACTATTCCAATCAATAGAAAAAGAGGGAATCC
TCCCTAACTCATTTTATGAGGCCAGCATCATTCTGATACCAAAGCCGGGC
AGAGACACAACCAAAAAAGAGAATTTTAGACCAATATCCTTGATGAACAT
TGATGCAAAAATCCTCAATAAAATACTGGCAAACCGAATCCAGCAGCACA
TCAAAAAGCTTATCCACCATGATCAAGTGGGCTTCATGCCTGGGATGCAA
GGCTGGTTCAATATACGCAAATCAATAAATGTAATCCAGCATATAAACAG
AGCCAAAGACAAAAACCACATGATTATCTCAATAGATGCAGAAAAAGCCT
TTGACAAAATTCAACAACCCTTCATGCTAAAAACTCTCAATAAATTAGGT
ATTGATGGGACGTATTTCAAAATAATAAGAGCTATCTATGACAAACCCAC
AGCCAATATCATACTGAATGGGCAAAAACTGGAAGCATTCCCTTTGAAAA
CTGGCACAAGACAGGGATGCCCTCTCTCACCGCTCCTATTCAACATAGTG
TTGGAAGTTCTGGCCAGGGCAATCAGGCAGGAGAAGGAAATAAAGGGTAT
TCAATTAGGAAAAGAGGAAGTCAAATTGTCCCTGTTTGCAGACGACATGA
TTGTTTATCTAGAAAACCCCATCGTCTCAGCCCAAAATCTCCTTAAGCTG
ATAAGCAACTTCAGCAAAGTCTCAGGATACAAAATCAATGTACAAAAATC
ACAAGCATTCTTATACACCAACAACAGACAAACAGAGAGCCAAATCATGG
GTGAACTCCCATTCACAATTGCTTCAAAGAGAATAAAATACCTAGGAATC
CAACTTACAAGGGATGTGAAGGACCTCTTCAAGGAGAACTACAAACCACT
GCTCAAGGAAATAAAAGAGGACACAAACAAATGGAAGAACATTCCATGCT
CATGGGTAGGAAGAATCAATATCGTGAAAATGGCCATACTGCCCAAGGTA
ATTTACAGATTCAATGCCATCCCCATCAAGCTACCAATGACTTTCTTCAC
AGAATTGGAAAAAACTACTTTAAAGTTCATATGGAACCAAAAAAGAGCCC
GCATTGCCAAGTCAATCCTAAGCCAAAAGAACAAAGCTGGAGGCATCACA
CTACCTGACTTCAAACTATACTACAAGGCTACAGTAACCAAAACAGCATG
GTACTGGTACCAAAACAGAGATATAGATCAATGGAACAGAACAGAGCCCT
CAGAAATAATGCCGCATATCTACAACTATCTGATCTTTGACAAACCTGAG
AAAAACAAGCAATGGGGAAAGGATTCCCTATTTAATAAATGGTGCTGGGA
AAACTGGCTAGCCATATGTAGAAAGCTGAAACTGGATCCCTTCCTTACAC
CTTATACAAAAATCAATTCAAGATGGATTAAAGATTTAAACGTTAGACCT
AAAACCATAAAAAACCCTAGAAGAAAACCTAGGCATTACCATTCAGGACA
TAGGCGTGGGCAAGGACTTCATGTCCAAAACACCAAAAGCAATGGCAACA
AAAGCCAAAATTGACAAATGGGATCTAATTAAACTAAAGAGCTTCTGCAC
AGCAAAAGAAACTACCATCAGAGTGAACAGGCAACCTACAACATGGGAGA
AAATTTTCGCAACCTACTCATCTGACAAAGGGCTAATATCCAGAATCTAC
AATGAACTCAAACAAATTTACAAGAAAAAAACAAACAACCCCATCAAAAA
GTGGGCGAAGGACATGAACAGACACTTCTCAAAAGAAGACATTTATGCAG
CCAAAAAACACATGAAGAAATGCTCATCATCACTGGCCATCAGAGAAATG
CAAATCAAAACCACTATGAGATATCATCTCACACCAGTTAGAATGGCAAT
CATTAAAAAGTCAGGAAACAACAGGTGCTGGAGAGGATGTGGAGAAATAG
GAACACTTTTACACTGTTGGTGGGACTGTAAACTAGTTCAACCATTGTGG
AAGTCAGTGTGGCGATTCCTCAGGGATCTAGAACTAGAAATACCATTTGA
CCCAGCCATCCCATTACTGGGTATATACCCAAAGGACTATAAATCATGCT
GCTATAAAGACACATGCACACGTATGTTTATTGCGGCACTATTCACAATA
GCAAAGACTTGGAACCAACCCAAATGTCCAACAATGATAGACTGGATTAA
GAAAATGTGGCACATATACACCATGGAATACTATGCAGCCATAAAAAATG
ATGAGTTCATATCCTTTGTAGGGACATGGATGAAATTGGAAACCATCATT
CTCAGTAAACTATCGCAAGAACAAAAAACCAAACACCGCATATTCTCACT
CATAGGTGGGAATTGAACAATGAGATCACATGGACACAGGAAGGGGAATA
TCACACTCTGGGGACTGTGGTGGGGTCGGGGGAGGGGGGAGGGATAGCAT
TGGGAGATATACCTAATGCTAGATGACACATTAGTGGGTGCAGCGCACCA
GCATTGGCACATGTATACATATGTAACTAACCTGCACAATGTGCACATGT
ACCCTAAAACTTAGAGTATAATAAA
SEQ ID NO. 34
5′-AATTCTCCGAACGTGTCACGT-3′
SEQ ID NO. 35
5′-AGCTTAAAAAGAGAACGCCACAAAGATACTCTCTTGAAGTATCTTTG
TGGCGTTCTCGGG-3′
SEQ ID NO. 26
5′-cctattggcg ttactatggg aacatacgtc attattgacg
tcaatgggcg ggggtcgttgggcggtcagc caggcgggcc
atttaccgta agttatgtaa cgcggaactc
catatatgggctatgaacta atgagcccgt aattgattac
tattagcccg ggcaatgtgc acatgtaccctaaaacttaa
agtataataa agacgtcagg gttcgaaatc gataagcttg
gatcccccgacctcgagggg ggaggccggc aaggccggat
ccagacatga taagatacat tgatgagtttggacaaacca
caactagaat gcagtgaaga aaatgcttta tttgtgaaat
ttgtgatgctattgctttat ttgtaaccat tataagctgc
aataaacaag ttaacaacaa caaaaaaaaaaaaaaaaaaa
aaaaaaaaaa aaaaaaaaaa aaaaaaaaaa aaaaaaaaaa
aaaaaaaaaaaaaaaaaaaa aaaaaaaata acttgaagca
aataaacaag acgaccaatt caatgtgctggaacaccgta
agtttgcagt ttctgacata taaaatgtgg aggggaccta
tgttaccctaaacctttcca cccactgctt cagctaaagg
gtcaatgaag aacaagcttc ctatgtatcacgtgacagtt
ttgggattca ggcactggta aaggcaacag cccttaagtg
atccaagatattttctcttt ttcacattgc aattctatct
tggtttatca tggggttctt gtattttatcaacatcccta
ctctgacaga acagacaaaa tgctatagcg atggcatcct
tgtagtgggaagaacagacc acagaccctg agagctatcc
tgggtcatcc tcaggaatgt gtgaaaggtagaaaggatct-3′
SEQ ID NO. 27
5′-ggggggagga gccaagatgg ccgaatagga acagctccgg
tctacagctc ccagcgtgagcgacgcagaa gacggtgatt
tctgcatttc catctgaggt accgggttca
tctcactagggagtgccaga cagtgggcgc aggccagtgt
gtgtgcgcac cgtgcgcgag ccgaagcagggcgaggcatt
gcctcacctg ggaagcgcaa ggggtcaggg agttcccttt
ccgagtcaaagaaaggggtg acggacgcac ctggaaaatc
gggtcactcc cacccgaata ttgcgcttttcagaccggct
taagaaacgg cgcaccacga gactatatcc cacacctggc
tcggagggtcctacgcccac ggaatctcgc tgattgctag
cacagcagtc tgagatcaaa ctgcaaggcggcaacgaggc
tgggggaggg gcgcccgcca ttgcccaggc ttgcttaggt
aaacaaagcagcagggaagc tcgaactggg tggagcccac
cacagctcaa ggaggcctgc ctgcctctgtaggctccacc
tctgggggca gggcacagac aaacaaaaag acagcagtaa
cctctgcagacttaagtgtc cctgtctgac agctttgaag
agagcagtgg ttctcccagc acgcagctggagatctgaga
acgggcagac tgcctcctca agtgggtccc tgacccctga
cccccgagcagcctaactgg gaggcacccc ccagcagggg
cacactgaca cctcacacgg cagggtattccaacagacct
gcagctgagg gtcctgtctg ttagaaggaa aactaacaac
cagaaaggacatctacaccg aaaacccatc tgtacatcac
catcatcaaa gaccaaaagt agataaaaccacaaagatgg
ggaaaaaaca gaacagaaaa actggaaact ctaaaacgca
gagcgcctctcctcctccaa aggaacgcag ttcctcacca
gcaacagaac aaagctggat ggagaatgattttgatgagc
tgagagaaga aggcttcaga cgatcaaatt actctgagct
acgggaggacattcaaacca aaggcaaaga agttgaaaac
tttgaaaaaa atttagaaga atgtataactagaataacca
atacagagaa gtgcttaaag gagctgatgg agctgaaaac
caaggctcgagaactacgtg aagaatgcag aagcctcagg
agccgatgcg atcaactgga agaaagggtatcagcaatgg
aagatgaaat gaatgaaatg aagcgagaag ggaagtttag
agaaaaaagaataaaaagaa atgagcaaag cctccaagaa
atatgggact atgtgaaaag accaaatctacgtctgattg
gtgtacctga aagtgatgtg gagaatggaa ccaagttgga
aaacactctgcaggatatta tccaggagaa cttccccaat
ctagcaaggc aggccaacgt tcagattcaggaaatacaga
gaacgccaca aagatactcc tcgagaagag caactccaag
acacataattgtcagattca ccaaagttga aatgaaggaa
aaaatgttaa gggcagccag agagaaaggtcgggttaccc
tcaaaggaaa gcccatcaga ctaacagcgg atctctcggc
agaaaccctacaagccagaa gagagtgggg gccaatattc
aacattctta aagaaaagaa ttttcaacccagaatttcat
atccagccaa actaagcttc ataagtgaag gagaaataaa
atactttatagacaagcaaa tgttgagaga ttttgtcacc
accaggcctg ccctaaaaga gctcctgaaggaagcgctaa
acatggaaag gaacaaccgg taccagccgc tgcaaaatca
tgccaaaatgtaaagaccat caagactagg aagaaactgc
atcaactaat gagcaaaatc accagctaacatcataatga
caggatcaac ttcacacata acaatattaa ctttaaatat
aaatggactaaattctgcaa ttaaaagaca cagactggca
agttggataa agagtcaaga cccatcagtgtgctgtattc
aggaaaccca tctcacgtgc agagacacac ataggctcaa
aataaaaggatggaggaaga tctaccaagc caatggaaaa
caaaaaaagg caggggttgc aatcctagtctctgataaaa
cagactttaa accaacaaag atcaaaagag acaaagaagg
ccattacataatggtaaagg gatcaattca acaagaggag
ctaactatcc taaatattta tgcacccaatacaggagcac
ccagattcat aaagcaagtc ctcagtgacc tacaaagaga
cttagactcccacacattaa taatgggaga ctttaacacc
ccactgtcaa cattagacag atcaacgagacagaaagtca
acaaggatac ccaggaattg aactcagctc tgcaccaagc
agacctaatagacatctaca gaactctcca ccccaaatca
acagaatata catttttttc agcaccacaccacacctatt
ccaaaattga ccacatagtt ggaagtaaag ctctcctcag
caaatgtaaaagaacagaaa ttataacaaa ctatctctca
gaccacagtg caatcaaact agaactcaggattaagaatc
tcactcaaag ccgctcaact acatggaaac tgaacaacct
gctcctgaatgactactggg tacataacga aatgaaggca
gaaataaaga tgttctttga aaccaacgagaacaaagaca
ccacatacca gaatctctgg gacgcattca aagcagtgtg
tagagggaaatttatagcac taaatgccta caagagaaag
caggaaagat ccaaaattga caccctaacatcacaattaa
aagaactaga aaagcaagag caaacacatt caaaagctag
cagaaggcaagaaataacta aaatcagagc agaactgaag
gaaatagaga cacaaaaaac ccttcaaaaaatcaatgaat
ccaggagctg gttttttgaa aggatcaaca aaattgatag
accgctagcaagactaataa agaaaaaaag agagaagaat
caaatagaca caataaaaaa tgataaaggggatatcacca
ccgatcccac agaaatacaa actaccatca gagaatacta
caaacacctctacgcaaata aactagaaaa tctagaagaa
atggatacat tcctcgacac atacactctcccaagactaa
accaggaaga agttgaatct ctgaatcgac caataacagg
ctctgaaattgtggcaataa tcaatagttt accaaccaaa
aagagtccag gaccagatgg attcacagccgaattctacc
agaggtacaa ggaggaactg gtaccattcc ttctgaaact
attccaatcaatagaaaaag agggaatcct ccctaactca
ttttatgagg ccagcatcat tctgataccaaagccgggca
gagacacaac caaaaaagag aattttagac caatatcctt
gatgaacattgatgcaaaaa tcctcaataa aatactggca
aaccgaatcc agcagcacat caaaaagcttatccaccatg
atcaagtggg cttcatccct gggatgcaag gctggttcaa
tatacgcaaatcaataaatg taatccagca tataaacaga
gccaaagaca aaaaccacat gattatctcaatagatgcag
aaaaagcctt tgacaaaatt caacaaccct tcatgctaaa
aactctcaataaattaggta ttgatgggac gtatttcaaa
ataataagag ctatctatga caaacccacagccaatatca
tactgaatgg gcaaaaactg gaagcattcc ctttgaaaac
cggcacaagacagggatgcc ctctctcacc gctcctattc
aacatagtgt tggaagttct ggccagggcaatcaggcagg
agaaggaaat aaagggtatt caattaggaa aagaggaagt
caaattgtccctgtttgcag acgacatgat tgtttatcta
gaaaacccca tcgtctcagc ccaaaatctccttaagctga
taagcaactt cagcaaagtc tcaggataca aaatcaatgt
acaaaaatcacaagcattct tatacaccaa caacagacaa
acagagagcc aaatcatggg tgaactcccattcacaattg
cttcaaagag aataaaatac ctaggaatcc aacttacaag
ggatgtgaaggacctcttca aggagaacta caaaccactg
ctcaaggaaa taaaagagga gacaaacaaatggaagaaca
ttccatgctc atgggtagga agaatcaata tcgtgaaaat
ggccatactgcccaaggtaa tttacagatt caatgccatc
cccatcaagc taccaatgac tttcttcacagaattggaaa
aaactacttt aaagttcata tggaaccaaa aaagagcccg
cattgccaagtcaatcctaa gccaaaagaa caaagctgga
ggcatcacac tacctgactt caaactatactacaaggcta
cagtaaccaa aacagcatgg tactggtacc aaaacagaga
tatagatcaatggaacagaa cagagccctc agaaataatg
ccgcatatct acaactatct gatctttgacaaacctgaga
aaaacaagca atggggaaag gattccctat ttaataaatg
gtgctgggaaaactggctag ccatatgtag aaagctgaaa
ctggatccct tccttacacc ttatacaaaaatcaattcaa
gatggattaa agatttaaac gttaaaccta aaaccataaa
aaccctagaagaaaacctag gcattaccat tcaggacata
ggcgtgggca aggacttcat gtccaaaacaccaaaagcaa
tggcaacaaa agacaaaatt gacaaatggg atctaattaa
actaaagagcttctgcacag caaaagaaac taccatcaga
gtgaacaggc aacctacaac atgggagaaaatttttgcaa
cctactcatc tgacaaaggg ctaatatcca gaatctacaa
tgaactcaaacaaatttaca agaaaaaaac aaacaacccc
atcaaaaagt gggcgaagga catgaacagacacttctcaa
aagaagacat ttatgcagcc aaaaaacaca tgaagaaatg
ctcatcatcactggccatca gagaaatgca aatcaaaacc
actatgagat atcatctcac accagttagaatggcaatca
ttaaaaagtc aggaaacaac aggtgctgga gaggatgcgg
agaaataggaacacttttac actgttggtg ggactgtaaa
ctagttcaac cattgtggaa gtcagtgtggcgattcctca
gggatctaga actagaaata ccatttgacc cagccatccc
attactgggtatatacccaa atgagtataa atcatgctgc
tataaagaca catgcacacg tatgtttattgcggcactat
tcacaatagc aaagacttgg aaccaaccca aatgtccaac
aatgatagactggattaaga aaatgtggca catatacacc
atggaatact atgcagccat aaaaaatgatgagttcatat
cctttgtagg gacatggatg aaattggaaa ccatcattct
cagtaaactatcgcaagaac aaaaaaccaa acaccgcata
ttctcactca taggtgggaa ttgaacaatgagatcacatg
gacacaggaa ggggaatatc acactctggg gactgtggtg
gggtcgggggaggggggagg gatagcattg ggagatatac
ctaatgctag atgacacatt agtgggtgcagcgcaccagc
atggcacatg tatacatatg taactaacct gcacaatgtg
cacatgtaccctaaaactta gagtataat-3′(6019)

1. A method for inhibiting unspecialised proliferation of cancerous tissue in a patient, comprising administering to said patient an interferent RNA (RNAi) or a DNA construct encoding said RNAi, wherein the RNA recognises a portion of at least one LINE-1 (Ll) repeat element.

2. A method for treating a cancerous lesion in a patient, comprising administering to said patient an interferent RNA (RNAi) or a DNA construct encoding said RNAi, wherein the RNA recognises a portion of at least one LINE-1 (Ll) repeat element.

3. A RNAi molecule, wherein the RNA recognises a portion of at least one LINE-1 (L1) repeat element.

4. The RNAi according to claim 3, which is specific for a transcribed open reading frame of a LINE-1 family member.

5. The RNAi according to claim 4, wherein the open reading frame encodes Reverse Transcriptase.

6. The RNAi according to claim 3, wherein the Ll element is an active Ll element.

7. The RNAi according to claim 3, which is specific for a LINE-1 consensus sequence.

8. The RNAi according to claim 3, wherein the RNAi is a short interfering RNA (siRNA).

9. The RNAi according to claim 3, wherein the RNAi is a double-stranded RNA (dsRNA).

10. The RNAi according to claim 3, wherein the RNAi is a short hairpin RNA, adapted for administration by means of an siRNA expression vector.

11. The RNAi according to claim 3, wherein the RNAi sequence recognises and is capable of binding to RNA obtainable by transcription from an ORF comprised within the target Ll.

12. The RNAi according to claim 11, wherein binding of the RNAi is under stringent conditions, such as in a buffer containing 50% formamide and 6×SSC.

13. The RNAi according to claim 3, wherein the Ll sequence recognised by the RNAi comprises at least a portion of an ORF.

14. The RNAi according to claim 13, wherein the Ll ORF sequence is selected from the group consisting of SEQ ID NOS. 20-25 and DNA sequences corresponding thereto.

15. The RNAi according to claim 3, wherein the RNAi comprises at least 20 consecutive nucleotides from a sequence selected from the group consisting of SEQ ID NOS. 39-44.

16. The RNAi according to claim 3, wherein the RNAi is directed to DNA comprised within positions 907 to 1923 of SEQ ID NO. 27 and/or 1987 to 5814 of SEQ ID NO. 27.

17. The RNAi according to claim 16, wherein the RNAi is capable of inhibiting expression of the proteins according to SEQ ID NO. 45 and/or SEQ ID NO. 46.

18. The RNAi according to claim 17, wherein the RNAi comprises a stretch of RNA that corresponds to an RNA sequence encoding the protein according to SEQ ID NO. 45 and/or SEQ ID NO. 46.

19. The RNAi according to claim 18, wherein the RNAi consists of a 20 or 21 bp stretch of RNA that corresponds to an RNA sequence encoding the protein according to SEQ ID NO. 45 and/or SEQ ID NO. 46.

20. The RNAi according to claim 18, wherein the RNAi has the sequence of SEQ ID NO. 19, or its RNA equivalent, SEQ ID NO. 47.

21. The RNAi according to claim 3, wherein the at least one Ll is polymorphic and/or 6 kbp in length.

22. The RNAi according to claim 3, wherein the at least one Ll is highly active in human beings, a “hot Ll,” having at least ⅓ of the activity of LIRP, SEQ ID NO. 27.

23. The RNAi according to claim 3, wherein the at least one Ll sequence is selected from the group consisting of SEQ ID NOS. 35-38, or homologues having at least 70% sequence homology to said SEQ ID NO. or its corresponding DNA sequence.

24. The RNAi according to claim 3, wherein the at least one LINE-1 element is derived from the ‘transcribed group A’ (Ta) subset of Ll elements or from the pre-Ta subset.

25. The RNAi according to claim 24, wherein the at least one Ll is selected from the group consisting of LRE3, LlRP (NCBI accession number AF148856), and accession numbers ac004200, ac002980, al356438, al512428, ac021017, and all37845, SEQ ID NOS. 26-33, respectively.

26. The RNAi according to claim 25, wherein the at least one Ll is LI_{RP}, SEQ ID NO. 27.

27. The RNAi according to claim 10, wherein the expression vector is of retroviral or adenoviral origin comprising a DNA construct encoding the siRNA.

28. The RNAi according to claim 10, wherein the expression vector is a plasmid comprising a DNA construct encoding the siRNA.

29-31. (canceled)

32. A method for stimulating differentiation of cancerous tissue in a patient, comprising administering to said patient an interferent RNA (RNAi) or a DNA construct encoding said RNAi, wherein the RNA recognises a portion of at least one LINE-1 (LI) repeat element.

The application's sequence listing, which the Patent Office published only in electronic form, follows.

SEQUENCE LISTING (47 sequences)

SEQ ID NO: 1 - DNA, 20 bp, Artificial Sequence
  Description of Artificial Sequence: Synthetic primer
gtcacacccttctcccttcg

SEQ ID NO: 2 - DNA, 20 bp, Artificial Sequence
  Description of Artificial Sequence: Synthetic primer
tgtgctgatgtgtggagacg

SEQ ID NO: 3 - DNA, 20 bp, Artificial Sequence
  Description of Artificial Sequence: Synthetic primer
agagaagctggcctcctacc

SEQ ID NO: 4 - DNA, 22 bp, Artificial Sequence
  Description of Artificial Sequence: Synthetic primer
ggtgccacctgtggtccacctg

SEQ ID NO: 5 - DNA, 22 bp, Artificial Sequence
  Description of Artificial Sequence: Synthetic primer
cttcacttgtggcccagatagg

SEQ ID NO: 6 - DNA, 20 bp, Artificial Sequence
  Description of Artificial Sequence: Synthetic primer
ctgaagagctcctccaccac

SEQ ID NO: 7 - DNA, 20 bp, Artificial Sequence
  Description of Artificial Sequence: Synthetic primer
ctcctctcctggcctcagaa

SEQ ID NO: 8 - DNA, 20 bp, Artificial Sequence
  Description of Artificial Sequence: Synthetic primer
tactgctgcttggcctcaaa

SEQ ID NO: 9 - DNA, 20 bp, Artificial Sequence
  Description of Artificial Sequence: Synthetic primer
gaacgcattgccacatacac

SEQ ID NO: 10 - DNA, 20 bp, Artificial Sequence
  Description of Artificial Sequence: Synthetic primer
ttgtcttcctcaccctgtcc

SEQ ID NO: 11 - DNA, 20 bp, Artificial Sequence
  Description of Artificial Sequence: Synthetic primer
agcacacagcatgaacttgg

SEQ ID NO: 12 - DNA, 20 bp, Artificial Sequence
  Description of Artificial Sequence: Synthetic primer
ccacacccgctctacgatat

SEQ ID NO: 13 - DNA, 20 bp, Artificial Sequence
  Description of Artificial Sequence: Synthetic primer
ccctcggtgtcctacttcaa

SEQ ID NO: 14 - DNA, 20 bp, Artificial Sequence
  Description of Artificial Sequence: Synthetic primer
tcctcctcttcctcctcctc

SEQ ID NO: 15 - DNA, 20 bp, Artificial Sequence
  Description of Artificial Sequence: Synthetic primer
cgcacgatttcattgaacac

SEQ ID NO: 16 - DNA, 20 bp, Artificial Sequence
  Description of Artificial Sequence: Synthetic primer
aggggtctacatggcaactg

SEQ ID NO: 17 - DNA, 20 bp, Artificial Sequence
  Description of Artificial Sequence: Synthetic primer
acccagaagactgtggatgg

SEQ ID NO: 18 - DNA, 20 bp, Artificial Sequence
  Description of Artificial Sequence: Synthetic primer
gtcagtggtggacctgacct

SEQ ID NO: 19 - DNA, 21 bp, Artificial Sequence
  Description of Artificial Sequence: Synthetic primer
aagagcaactccaagacacat

SEQ ID NO: 20 - DNA, 20 bp, Artificial Sequence
  Description of Artificial Sequence: Synthetic primer
agaaatgagcaaagcctcca

SEQ ID NO: 21 - DNA, 20 bp, Artificial Sequence
  Description of Artificial Sequence: Synthetic primer
gcctggtggtgacaaaatct

SEQ ID NO: 22 - DNA, 20 bp, Artificial Sequence
  Description of Artificial Sequence: Synthetic primer
tccagcagcacatcaaaaag

SEQ ID NO: 23 - DNA, 20 bp, Artificial Sequence
  Description of Artificial Sequence: Synthetic primer
ccagtttttgcccattcagt

SEQ ID NO: 24 - DNA, 20 bp, Artificial Sequence
  Description of Artificial Sequence: Synthetic primer
taagggcagccagagagaaa

SEQ ID NO: 25 - DNA, 20 bp, Artificial Sequence
  Description of Artificial Sequence: Synthetic primer
tgacaaacccacagccaata

SEQ ID NO: 26 - DNA, 910 bp, Homo sapiens
cctattggcgttactatgggaacatacgtcattattgacgtcaatgggcgggggtcgttgggcggtcagccaggcgggccatttaccgtaagttatgtaacgcggaactccatatatgggctatgaactaatgagcccgtaattgattactattagcccgggcaatgtgcacatgtaccctaaaacttaaagtataataaagacgtcagggttcgaaatcgataagcttggatcccccgacctcgaggggggaggccggcaaggccggatccagacatgataagatacattgatgagtttggacaaaccacaactagaatgcagtgaagaaaatgctttatttgtgaaatttgtgatgctattgctttatttgtaaccattataagctgcaataaacaagttaacaacaacaaaaaaaaaaaaaaaaaaaaaaaaaaaaaaaaaaaaaaaaaaaaaaaaaaaaaaaaaaaaaaaaaaaaaaaaaaaaaaaaaaaaaaataacttgaagcaaataaacaagacgaccaattcaatgtgctggaacaccgtaagtttgcagtttctgacatataaaatgtggaggggacctatgttaccctaaacctttccacccactgcttcagctaaagggtcaatgaagaacaagcttcctatgtatcacgtgacagttttgggattcaggcactggtaaaggcaacagcccttaagtgatccaagatattttctctttttcacattgcaattctatcttggtttatcatggggttcttgtattttatcaacatccctactctgacagaacagacaaaatgctatagcgatggcatccttgtagtgggaagaacagaccacagaccctgagagctatcctgggtcatcctcaggaatgtgtgaaaggtagaaaggatct

SEQ ID NO: 27 - DNA, 6019 bp, Homo sapiens
ggggggaggagccaagatggccgaataggaacagctccggtctacagctcccagcgtgagcgacgcagaagacggtgatttctgcatttccatctgaggtaccgggttcatctcactagggagtgccagacagtgggcgcaggccagtgtgtgtgcgcaccgtgcgcgagccgaagcagggcgaggcattgcctcacctgggaagcgcaaggggtcagggagttccctttccgagtcaaagaaaggggtgacggacgcacctggaaaatcgggtcactcccacccgaatattgcgcttttcagaccggcttaagaaacggcgcaccacgagactatatcccacacctggctcggagggtcctacgcccacggaatctcgctgattgctagcacagcagtctgagatcaaactgcaaggcggcaacgaggctgggggaggggcgcccgccattgcccaggcttgcttaggtaaacaaagcagcagggaagctcgaactgggtggagcccaccacagctcaaggaggcctgcctgcctctgtaggctccacctctgggggcagggcacagacaaacaaaaagacagcagtaacctctgcagacttaagtgtccctgtctgacagctttgaagagagcagtggttctcccagcacgcagctggagatctgagaacgggcagactgcctcctcaagtgggtccctgacccctgacccccgagcagcctaactgggaggcaccccccagcaggggcacactgacacctcacacggcagggtattccaacagacctgcagctgagggtcctgtctgttagaaggaaaactaacaaccagaaaggacatctacaccgaaaacccatctgtacatcaccatcatcaaagaccaaaagtagataaaaccacaaagatggggaaaaaacagaacagaaaaactggaaactctaaaacgcagagcgcctctcctcctccaaaggaacgcagttcctcaccagcaacagaacaaagctggatggagaatgattttgatgagctgagagaagaaggcttcagacgatcaaattactctgagctacgggaggacattcaaaccaaaggcaaagaagttgaaaactttgaaaaaaatttagaagaatgtataactagaataaccaatacagagaagtgcttaaaggagctgatggagctgaaaaccaaggctcgagaactacgtgaagaatgcagaagcctcaggagccgatgcgatcaactggaagaaagggtatcagcaatggaagatgaaatgaatgaaatgaagcgagaagggaagtttagagaaaaaagaataaaaagaaatgagcaaagcctccaagaaatatgggactatgtgaaaagaccaaatctacgtctgattggtgtacctgaaagtgatgtggagaatggaaccaagttggaaaacactctgcaggatattatccaggagaacttccccaatctagcaaggcaggccaacgttcagattcaggaaatacagagaacgccacaaagatactcctcgagaagagcaactccaagacacataattgtcagattcaccaaagttgaaatgaaggaaaaaatgttaagggcagccagagagaaaggtcgggttaccctcaaaggaaagcccatcagactaacagcggatctctcggcagaaaccctacaagccagaagagagtgggggccaatattcaacattcttaaagaaaagaattttcaacccagaatttcatatccagccaaactaagcttcataagtgaaggagaaataaaatactttatagacaagcaaatgttgagagattttgtcaccaccaggcctgccctaaaagagctcctgaaggaagcgctaaacatggaaaggaacaaccggtaccagccgctgcaaaatcatgccaaaatgtaaagaccatcaagactaggaagaaactgcatcaactaatgagcaaaatcaccagctaacatcataatgacaggatcaacttcacacataacaatattaactttaaatataaatggactaaattctgcaattaaaagacacagactggcaagttggataaagagtcaagacccatcagtgtgctgtattcaggaaacccatctcacgtgcagagacacacataggctcaaaataaaaggatggaggaagatctaccaagccaatggaaaacaaaaaaaggcaggggttgcaatcctagtctctgataaaacagactttaaaccaacaaagatcaaaagagacaaagaaggccattacataatggtaaagggatcaattcaacaagaggagctaactatcctaaatatttatgcacccaatacaggagcacccagattcataaagcaagtcctcagtgacctacaaagagacttagactcccacacattaataatgggagactttaacaccccactgtcaacattagacagatcaacgagacagaaagtcaacaaggatacccaggaattgaactcagctctgcaccaagcagacctaatagacatctacagaactctccaccccaaatcaacagaatatacatttttttcagcaccacaccacacctattccaaaattgaccacatagttggaagtaaagctctcctcagcaaatgtaaaagaacagaaattataacaaactatctctcagaccacagtgcaatcaaactagaactcaggattaagaatctcactcaaagccgctcaactacatggaaactgaacaacctgctcctgaatgactactgggtacataacgaaatgaaggcagaaataaagatgttctttgaaaccaacgagaacaaagacaccacataccagaatctctgggacgcattcaaagcagtgtgtagagggaaatttatagcactaaatgcctacaagagaaagcaggaaagatccaaaattgacaccctaacatcacaattaaaagaactagaaaagcaagagcaaacacattcaaaagctagcagaaggcaagaaataactaaaatcagagcagaactgaaggaaatagagacacaaaaaacccttcaaaaaatcaatgaatccaggagctggttttttgaaaggatcaacaaaattgatagaccgctagcaagactaataaagaaaaaaagagagaagaatcaaatagacacaataaaaaatgataaaggggatatcaccaccgatcccacagaaatacaaactaccatcagagaatactacaaacacctctacgcaaataaactagaaaatctagaagaaatggatacattcctcgacacatacactctcccaagactaaaccaggaagaagttgaatctctgaatcgaccaataacaggctctgaaattgtggcaataatcaatagtttaccaaccaaaaagagtccaggaccagatggattcacagccgaattctaccagaggtacaaggaggaactggtaccattccttctgaaactattccaatcaatagaaaaagagggaatcctccctaactcattttatgaggccagcatcattctgataccaaagccgggcagagacacaaccaaaaaagagaattttagaccaatatccttgatgaacattgatgcaaaaatcctcaataaaatactggcaaaccgaatccagcagcacatcaaaaagcttatccaccatgatcaagtgggcttcatccctgggatgcaaggctggttcaatatacgcaaatcaataaatgtaatccagcatataaacagagccaaagacaaaaaccacatgattatctcaatagatgcagaaaaagcctttgacaaaattcaacaacccttcatgctaaaaactctcaataaattaggtattgatgggacgtatttcaaaataataagagctatctatgacaaacccacagccaatatcatactgaatgggcaaaaactggaagcattccctttgaaaaccggcacaagacagggatgccctctctcaccgctcctattcaacatagtgttggaagttctggccagggcaatcaggcaggagaaggaaataaagggtattcaattaggaaaagaggaagtcaaattgtccctgtttgcagacgacatgattgtttatctagaaaaccccatcgtctcagcccaaaatctccttaagctgataagcaacttcagcaaagtctcaggatacaaaatcaatgtacaaaaatcacaagcattcttatacaccaacaacagacaaacagagagccaaatcatgggtgaactcccattcacaattgcttcaaagagaataaaatacctaggaatccaacttacaagggatgtgaaggacctcttcaaggagaactacaaaccactgctcaaggaaataaaagaggagacaaacaaatggaagaacattccatgctcatgggtaggaagaatcaatatcgtgaaaatggccatactgcccaaggtaatttacagattcaatgccatccccatcaagctaccaatgactttcttcacagaattggaaaaaactactttaaagttcatatggaaccaaaaaagagcccgcattgccaagtcaatcctaagccaaaagaacaaagctggaggcatcacactacctgacttcaaactatactacaaggctacagtaaccaaaacagcatggtactggtaccaaaacagagatatagatcaatggaacagaacagagccctcagaaataatgccgcatatctacaactatctgatctttgacaaacctgagaaaaacaagcaatggggaaaggattccctatttaataaatggtgctgggaaaactggctagccatatgtagaaagctgaaactggatcccttccttacaccttatacaaaaatcaattcaagatggattaaagatttaaacgttaaacctaaaaccataaaaaccctagaagaaaacctaggcattaccattcaggacataggcgtgggcaaggacttcatgtccaaaacaccaaaagcaatggcaacaaaagacaaaattgacaaatgggatctaattaaactaaagagcttctgcacagcaaaagaaactaccatcagagtgaacaggcaacctacaacatgggagaaaatttttgcaacctactcatctgacaaagggctaatatccagaatctacaatgaactcaaacaaatttacaagaaaaaaacaaacaaccccatcaaaaagtgggcgaaggacatgaacagacacttctcaaaagaagacatttatgcagccaaaaaacacatgaagaaatgctcatcatcactggccatcagagaaatgcaaatcaaaaccactatgagatatcatctcacaccagttagaatggcaatcattaaaaagtcaggaaacaacaggtgctggagaggatgcggagaaataggaacacttttacactgttggtgggactgtaaactagttcaaccattgtggaagtcagtgtggcgattcctcagggatctagaactagaaataccatttgacccagccatcccattactgggtatatacccaaatgagtataaatcatgctgctataaagacacatgcacacgtatgtttattgcggcactattcacaatagcaaagacttggaaccaacccaaatgtccaacaatgatagactggattaagaaaatgtggcacatatacaccatggaatactatgcagccataaaaaatgatgagttcatatcctttgtagggacatggatgaaattggaaaccatcattctcagtaaactatcgcaagaacaaaaaaccaaacaccgcatattctcactcataggtgggaattgaacaatgagatcacatggacacaggaaggggaatatcacactctggggactgtggtggggtcgggggaggggggagggatagcattgggagatatacctaatgctagatgacacattagtgggtgcagcgcaccagcatggcacatgtatacatatgtaactaacctgcacaatgtgcacatgtaccctaaaacttagagtataat

SEQ ID NO: 28 - DNA, 42007 bp, Homo sapiens
ttagttgtgagttttcctgcgggcggcggagcccgtttccaccagaaccgcccagaggcgggcgctgccttcctggggtgacggagcagctggaagcgttttcggatcctggaatcagtgggcggcctgcgggaggggctgaggcgcctttccctactcacccggctccgaatccaccgcggtgctgtttcaagcgagtcagattccagatcgcgctccagcccggactcggaattcctgccccgcgggtctgcattttcacagcggcaggtgtgagtgccccgcagctggagcccagaaacctgaaggcagctcggccctccccagcccacagcgccgttattccgtttctatatcagtaaacacttgtcattttccgtagaccagggcgggatgatgggtgatcccagtcctcgcagtgaactccgggccgcagtcctgagaacgcgctcgggcgcccagcgcagccgcgtcctgagttacacacgcgaccgcgctgggccttttctctttcttttccggacccagcagtggcgcctacagtctgcgaggagaaaatcacctttgtgctggtaagtccaggaatctaaggcgagtgctgagggagaaaacgtagttgatggctcagagcagaaggggctggaggtagggtagagggggagggctttggacagaaaagacctgggagatttggttggggaggggcagccaggcctagaccctggggagcgactcatccaaagtccaagatcatcactgcctcccctaccccagaaagggagggattggcttcatgtcttgtcgcgatcacctctaaatgcgttggaacaaactttgcatattattattattagtatcatcgtcattgaagtattaaaagtcttcttgggggtgagctgaatgagatcctttgctggaactggcacagggagaaaaagtcctcgagagagggtagacactgtggagggaagagcttgggaccagcgtcaggagagctgggtccatctccctctctgcccctcactacccttgtgacctttagcagtgtaaataatccctgtaaggtggggacaagaccccagtccctgctgtgctcaataaatgataatgctcgaaataaataatcagtgaatgtggatgggaaaactaagtaattgttaaaactctgtggtgtatgacattttcatctacagaaaagtgtaggctaggggtcctggggaatggttagtaatcataggtagagttccattggaaaaaaaaatgctcgtaaagctgacgaagatggaagggacacagttcgtgatcatggatggttcattgtctaatgggggttggtaccagatggtaaatgacagctggacgtggtggcactcgcttgtagtcccaactactcaggaggctgaggtggcaggattgttctagccctcggctagagcgggagcggcttggcgtttctggggggtctgaatgggtcgcagcgagcgcgatgcggtcgcggcggggctcaggtgcgatgtgcagcgaggtgcgggagctggacgctgccggttgccgccactcctcagccctgcttttcagtctcttttcagtcctcctcgggatcgcgcatcacccccaccccctgcactttctggtctcttcttgcacttgctctcctcacctctcctccgcctcctctcactttttggacaaaccttctgaagtccctgggttcctgggctgttcctgtgaatggcattcgagggcccttccagctctgccgctgaggcagtcacatcccccggtgctcagagcggctctcgggtccctgaagccctgtcctctccctggagtccgcgtgttctcagctccagggcgggccgcagtccctggagttggggccctccttttttcgggaccaggagctggtgcttcttattgctgtggggactatggggctcctgagtctcaagctgaggggttggagtctgccggctccaggcagaggattcttcctgcgactgctcccatccccagctcattctcccttcgcctcccgttcccagggttctttcctctgtcaaccctcccagctactgtggactccaatggtctaaggacaccaagttccctcctacttcctcagcttcctttctcatggccccctgggtcctgttgccctccctgctccctgctacccctttctatctgcagttctctgatccatttgtagggtgtcctctgccctcatcccctgctcccaccaccgcaggtccctcctgcctcccttatgggcctttcctacaagcagccttcacccagtgctgcccctatgcctctccattcccagctgtccctgaccctaactttctggtgctgccttttgtcgggggagtcttccctccatcccactcccctccaggccacttaaggggagccctggtgctaatgaaagttgggccttaggcagggcgcagggcaacgcagatgctccctcccctccagtgcagatgcctgctctgggccctgcctcaggtgacccgttccccactccttcatcctcagcctcaccctcttgaggaccccaccctgaaaccctcaggtgctggaccatccctccctggtccctctgcccctctctgccttgggaccttgtgctgttcccacctcttgaccagctgccttgggccctcagcaagttctcaccttccccaaaccccaccctcccccagacaacccctcccttcctgttctcactttaccccaagttctcccagggtcacccccccttccttctcatgccaccctttagtccttgccctgcccatctcctcacccccacccagacccaacacaggctctagtccaacggctccttgaccctcatcctctttcggttccttgaccccggtgggctgtcagttcctagacttcatatccaaaatcttcacttaccacatagtgggctgtggtcatcccctcctctgggccttctcccagcaccaccttcctcctgtgagggttttctaacctgaaccctcttttggagtgtgactgctccgccttcagcaccactcctctctgaaggcccttcctcaggccttgttttttttctctctgaccaggaccccagcctctttctaattctatattattgtttggtatgctgtgacaatttcttttttgttgtttaattgtcgtgaaatatatatataaagttcactattttcaccatttaaaagtgtacagttcagtggcattaagtacattcacatttttgtgcatcctgaaactctgtgcctactaaacagtagctccccattcctccttccccctggccgctggaaccactggttctactctctgtctctatgaatttggctattgggaattatgctgctatgaacatgagtgttcaaatatctttttaatgttcctgctttcatttcttttgggtaaatacccagatgtagaatttctggattacatagtaattaattttttagtttttggaggaagcaacacactgatttccatagcaggtgccccactttgtctttcccaatgtactacacaaatgttccagtttctctacctctttgccaaacttgctttctctctctctctctctctgtgtgtgtgcgtgtgtgtgtgtgtgtgtgtgtttgattatagccatcctaattggtgtgaagtagtagcccattgcagttttgatttgcatttccctaataactacagatgttgagcatcttttcatgtgtctattggccatttgtatgtcttcttcggagaattggctattcaaattctttgcctacatagtttttttgagtcttatgtttgtgttacaggaattctttatgtattctggatattaatcttttattagataaatgatttgcaaatattttcttccattctaatggttgctttttcactctgcagattgtgttttttaatgctcaattttttttattttgatgggtccaacttatcaattttttctttgttgtctgtgctttggtgttatatccataaaagtgttgtcaaaacctatgtcatgaagattattcccaatgtttcattctaagaatttttcagttttagttcctgagtgtaggtctttgatttatttagagttaacttgtatatgtggtgtaagtcaggagtccaacttcatttctttttgcatgtgaatgtcgttttcctggcactgtttctggaaaagatgcactgatcctcccttactcccatcttgtacatgatgagccttcctcaaaggcagcggcccgcgactccatctcaccctcacctgtgtagcacagccatgctggtcatgggtccctctgagcctgggtcccttcccatttccaccctcccctctggcaagaccttccttccaccactgccttcgtgctcctccctcaccactgcagggcagcctctctccttggcctcctccctatacccttaggtggcctgtggccaccctgccttggcagctggcctacatgtttgccatctccattcccccttcttctgttcctcagtctgctcctccatcctcctgccctcccagttttccttgtatctgaaatcttcattcttgtccctttgcatatgtacatttcctgcctcctcagaaaggttgagacagcagacctgtgtgttaaacatcaatgtgaagttacttccaggaagaagtttcatccgtggtttcttgttccccagggccccacagtcttcattacaacctcacggtgctgtcccgggatggatctgtgcagtcagggtttcttgctgagggacatctggatggtcagcccttcctgctcttcaacaggcagaaaggcagggctgggtcctggggacagtgggcagaagcagttctgggagctgagacctgggacacagagactgaggacttgacagagaatgggcaggacctcagaagggccctggcatatatcaagggacagaagggaggtgagaggtggcagcaggcaagagtgatgggagaccttttccaggagagctgggggcagagagcagggacctgtctgtccccactggatctggctgggggcaggggtgaggaataggggtcagcagagctcggtggggaggtaacctggcactcagcccacacagaaaggcatggaggagggccagggaggggtctcctctggtctgagttcctcacttggaactgctgggtgggggtagccttgcattccctccaggagattaggggttgtgagatcaggaagccagcagcaccaggggctctaggcattcctactcttatgggtagctcttcctctctctcaacctggagactcaggaatggacagtatcccagtcctccagaactcagacctttgctatgaatatcacaaatttctagaaggaagatgctatgccggccgagacacactctcaccctatatgggtagactgcaggcagaaactacagcagtatctggaatcctgtgtgggtgtcaggagagcaggtactgggcctgggtaggggctttcctctcccctattccactagagtcaccccgacccccaactctgtccagggaaaccctccttgtgctatggatgcatgtgttttctgttggtgtgttatatcctgatttttctctcctgttagagccactggaaaaagacagtgggtcagggattgaagggtccagtgtcacaatctggggaagcagtgggccctttgacagaagcctgaacctgggtgtgtgtcaggcaggagaggaaggccccagggccaaggctgccccatctgcttcccagcctgcccatccctaagagttccctctggccccatgtaccaggagcccacccctgacattcccctcctcagcatcaatgcagggatcccagagcataaagacacagtctcgaggcccatccttctgccagccttgaggaattggtccccagggtgaggacagacttgcagaaggtctggggtccgtgaggacttctgccagagtcggagcagtggagcggaccagccctattccctgcatctccattagaggggagcagggtttggccatgtgcctcattgtctctgccctttcttctccagtcccccactcctccaccatgagtgtggcctgcagtgaggccctggagggcaacatcaccctgatatgctgggctctggcttgaatctccagaatatctctctgacctggtgacaggatggggcgtctttgagccaggatgcccagcagtcttggggtgttctgtccaatgggatgggacctaccacacagaggtggcctgcaggattccccaaggagaggagcagagggtcatctgctccatgggatacagcaggaatcacagcactcaccctgtgtcctctagtgaacctgggaccacccttgagggttccaacataaggaggatcaggccagggtgggggcagcaggaacggctgtggctgtgggtgcccagtgtgtaacaggccctttttttcagggatggccctggtgcttcagagttgatgaccagccattccatatgttgctgctgttgctgctttcatcatcattagtattattagtagtattattattctctgtgtcctttgatgcaagaagaagacaacatcaggtgcagagggtccaggtgagaaaaggggacagttgctagagatgggagggtccctgtctgggctgtagggtcccctcataccttctgtgcagataggcttgtaggtgacaaggcttctggaacaggcgatgaaagttggggtatttgggaggggaatgagagccacgttgccatctacatccctgtgagaaagaaactcacccattcaaacccaaagaatagactcagagacccagagaacagcgaaagagagacttttaatgacagtcttgcaagatcaggtgtctggagtgcaggtacacctgggacagtttcaacaaactatttcttccctagtgtgcaagtcccttccccaattcctcattagctgagtactacggggttatagtcttcctgggcatcgcctattggtagttgtattaagacttcaagtatgttctttagggtctttttgctgcattttttgctgcattttgttgcagccacccataatgcatggcgactgtctcaagactctgagcatttgacttatggccctagtggctgcacttaggtgatggcaagctagcccaaactaaattctttggtgaggtggggaggggggtcattgagggggccctgaccagtaggctcctggacactgggtcaaagggaaagcaggaaggaggggattgtggcttagtatattttgcttctttatctctttgtttccatgtggcctgcttaaacatattctaaggcacttatgaaaatgaaccttcttcacatgtaggttattttttacacttacctcctctttttctttttaccctttttggtcttattttcacttacatatctttgtttattaactgttctggaagttttttactttcttcattataggaggagaagtttagtttggcttttaataatagtaagtcattctgttgggacattaggggcatttgtttactaatagctgctttaattaacctttgtgttaaataaacccttcacacaaggtatgatacaacatcctatggctgttaagaccccagccataatcacgagagatgtaagaattgaaggtaccattcctttctatttttcaaaccaaccttctaaccagttagtaaaaaggtcatttactcctgtgttttctgccagctcgttgactagagttgttagtccctgccatccctttatgatggttccatttggggcagcattgttgtgaatggaagtgtcacattttccacccagcatatcacatatatcacctttctctgctaatattatgtccagtgtaattctgttttcccaagccatttagctagtggcatttagttgtctggctactcccttaagggcattttgcgtgtaattgatgaatctttgctgattataagacatgtaattaatctaatttacattcttgttaatagttgaccaccagaaaagtgctgactcaaatctagcaggtatttggtttcgtgctttaaatttattaggcactcctctaggtactcctatggagtttagatagataaatagatagatagatggatagatagatatacaaagctttcatccactgttccagaagccttgtgtgtatgtgtgtgtgtatatatatatgtgtgtgtgtgtgtatatatatgtgtgtgtatatatatgtatatgtatatgtttgtgtgtgtgtgtgtatatatatatatatacacacacacattatatatgggttaaaataaattgctaaattactctgatctctatgaccatgtgtatttttagctgtttcatggaatgacagggtgaacggaatggccaattgtactaaagcacaagtcccggtccaattggacggtaacaagttacggaggttccctttcccgaaataccaccagacatttgcctggggtatatggagagttgaatggttgccacagtctgggttaccagtgacatttaggatgtgggtgcaggttgcgagttttcccacaggtttatcgaacctcaccttctgtctagagtgacaacaggagtgatttatattccctatagagaatgaggggattgctttaggatctgatctctgcaaagtgggaaagagcaatgacagacttttacaagtcttatttccccatgcaaccttgtcttggtatacagccaacacgcaacacattcctttgggattagtatcccatccaaggggaaatggaaccacctgtgcctgaggttgaccagcagcacatgcataacagttacttttatcgagggcttgtgctgaaaatttcacccatttaacacaggcatttatgtctctatatcctgttttaatttttaaagtctgccttaagtcagttactttaattatttttactctcttaggtttattgtttggtgggttaaaggaagttaatgggaccaggagttctagtaattctgggtgggcttggggtagagttggtgactaacctaaaagctaactgtcccacgggattcctttctgagatatttatttttaatttataacttcaagatttctggtttagagtagctgggttgtttatagtaattaatataggattgcactttaaatttttacagttaggtggcgtgtggttcttatacaatacttaggtttcctttcaccccttgtgttaggattaattctaaccatatcagcccccagtgatggagcctgcttatggcttacttttaggttttccttagaattagcttaaagggtttcttaggtgatctatacacttccaatttaccttccgttttttttttaaccagtttcttgacccgagtgtaatgtgtccacccctgatcagctgtttgtacagctgcctcacttgatagggaccttcccagcttgggtggagcttgtcttctttccaagtcttaattagcactgagttgccaagctggaagtggtgaactgtgaactcaaggggtggggtttgtgttacaagttcttttaaccttaagttgtttcctgggagttcacacaattcccacacacttgtttagccagggcatacatttctatacacccataattctttagtatttcatcatacatgtcctggggaccccaatgacttcccttatgcaatatagacattagattttttttctttttttagacagaatctcgctctgtcacccaggctggagtgcagtggcacgatctcggctcactgcaagctccacctcttgggttcatgccattctcctgcctcagcctcccgagtagctggaactacaggcacccaccaccacgccccggctacttttttgtatttttagtagagacagggtttcactgtgttagccaggatggttttgatctcctgaccttgtgatctacccgcctccacctcccaaagtgctgggattacaggcatgagccaccgcacccggccaacattagattttttattatgggtttgtttattatttctctcccatcagggagcactcaccttccattcttagtttaagtggctcctatcttgcctagcttttcctcctcttttgaaaattggggttttaatatcaccttagggatatctgggctaaacagtttaaatttttcctccagggagacttgcttagcagccttatccacaagcctgttccctacagcttctatagtgtttcttttctgatggccatttacatgaactatggctgtctctgctggaaacaggaggctttctaaaacttgttccccatgtaccaattattttgccctgctattttctaggccctgctctgtctagattttttcaaaggtgtgtactactttataggcatatttggaattagtatatatagtgtcttcttgatcttctaggagctttagggtctggttaaaagcataaaatttacaggtttgggctgaccagttattgagtaatttaactttttcacataaggattgtttgtttttgttcatgacagcacagccattgtgtcttttaccatttattactcaggatgacccattcataaacaacctcatcccattatgtagtagagttcctttaaggtttggtactaactttagtttgatactctgtgatatctaaacagttatactctgacgccttcttattctcctctccttttcataagaaactggctggtgttagtttagtcacctcccgagggcccattgaccccaggaggaacttggggaggcaagggactgatcagctggcatcccagagtgcccttggccgggccctgctgggtttggctttgggccaagagctgctggtttgaagatctgccagcctatggagccttccctgatgggtactctcattagaaaaggcatttctggctccgccctcccttcctgttttttttttttttgtgcttcaaaggcaccgttcctctccgtggcaggcctagaggtgcactgtttgtgtttcaagcaacccccactggtgacccagcaactgtaaagggtctccagtttgtccagccctgggaggggacttagtggcttttcctcctcctgggctgcaaggatcctcccctggcccagcccgactctgggaaacagaacttttacacattccaccttaaagcattttggcagacttttccccagcacgagctctctctacttcagggattgcaaactggcatcctcttttgcctgttttgggtttttaagttatttgaacagaatatcagcattttaaaattatattttacataaaaagtcagaattttgtcctctgacaaagcagacaatctggcaacacagtgccagcactgtaagaagagctgagcagccgccacagttcccacccagccctgcagccctcctttttattatttgctggccctgtagtcatttgagtttacagccctagtactgattttccttatgtagcgaccccagcccttctgctgccttactgacagctaactgcccctggtggccttccagcctctcactaaaacaacaacaaaaccttaatgttatcttattcatttactcttccataacttgaatccttttgaccacctcctgataaacagccatctagtttttgctgtaggcaacccgttacacctcaggcagcctgatcctaaactctcctccacatccctttctcacttgcatccatccccctgttcccgggctttgtcgttcctcagtggccacgcactgcatgcacccttcccctgcacctccttgttgcttaagtccccagaaacttcccccagccctgccaacctctcagcattctctcactttgtcttgtactcttttttccttttacattatttgtctccccagttttaccttctgtgtttctctttgatctctgtctcttttagtctctcttgctaattttcctcttctattctctctctgtcatcccctgtttcctttctgtctcacactcagcttcttcctctttctctgggcatgagccgaactgtgctgtgccctggctccccttgtctgtctgcaaaaacaggcagctctgcggaaatgactcagcagtaacctttatcaacagcttttagaagccagctgccacacacagctgtgccgctggctctctcttccttcaggtatagcagcttaactctctctctctctctctttctttcacacacacacacaaactttctgagcttccctcagtatttccttaattggttttttattccatccgttaatcttttgcagtttcttgtaatattacatcagcttttagttacaaaattaacctttaaaaggccttgccctactgggtcctctggatttaatcctgaatattttttcacttgatccctgagcctctgcagaaatgcagagggagtctcctcttcttgttgttggatcttgaatgctttggggacgttttgtgtcctatgagtggactgcataatccctctaattattagctccctaaggtcttgcatttggacccgatccctggggtcattattatcccatccagggtctgcatttgggaatttctgcttagctggcaggactccttacccaggaggatgctgctgtctctcccaaatgattatggctgcccttctaattattcccgtctttttcccagtaaacagaatattcatgattgaattatctcagcccaagtataaaaattaggttctaaaaattgatctagctgttctgctaaactgaggggatcttccgagagtggcctaatttcctttttaaaattcctaacctcagtacttgttaaaggcacacttacaaatccaatttattattattatcattattatactttaaactctgggatacatgtgcagaacatgcaggtttgttacataggtatacatgtgccatggtggtttgctgcacccatcaacccatcatctacattaggtatttctcctaatgctatgcctcccctagccccctaccctcagacaggccccagtgtgtgatgttcccctccctgtgtccatgtgttctcattgttcaactcccatttgagtgagaacatgcagcatttggttttctgttcttgtgggtctttctctgagagacccagagaacacgtagctgatggtttcctgagaatgatggtttccagcttcatccatgtccctgcaaaggacatgaactcatcctttttatggctgcatagtattccatggtgtatatgtgccacattttctttattcagtctatcattgatgagcatttggattggttccaagtctttgctattgtgaacagtgccgcaataaacatatgtgtgtatgtatctttatagtaaaatgtttataatcctttgggtatatatccagtagtgggattgctgggtcaaatggtatttctggttctagatccttgaggaattgccacattatcttccacaatggttgaactaatttacactcccaccaacagtgtaaaagcgttcctatttctccacatcctctccagcatctgttgtttcctgactttttaatgatcgccattctaattggtgtgagatggtatctcattgtggttttgatttgcatttctctaatgataagtgactatgggccttttttcatatgtttgttgactacataaatgtctttttttgagaagtgtcttttcatatccgtcgcccactttttgatggagttgtttgtttttttcatgtaaattaagttctttgtagattctggatattagccctttgtcagatggacagattgcaaaaattttctcccattccgtaggtggcctgttcactctgatgatagtttattttgctgtgcagaagctctttagtttaattagatcccattagtcaattctggctttcgttgccattgctttttgtgttttagtcatgaagtcttcgcccatgcctagatcctgaatggtattgcctaggttttcttctagggtttttacagttttaggtcttatgtttaagtctttaatccatcttgagttgatttttgtataaggtgtaaggagggggtccagtttcagttttctgcatatggctagcgagttttcccaacaccatttattaaatcgggaatcctttccccattgcttgtttttatcaggtttgtccttccttacattgttctaattctttcctcaagtttggataaggatttaagggagcattgggtttagctccttcatgacctcccaaatccttttcctctgaccttccttttgccccctgatctccctgtcctctactttgtgagatgtatagggtgtagggcaagcgtgttaggggatcccagggcttttcactgggtgagggctctttactatgctctttttatttctctttaagggggaacacggggctcaattcactaatccagcaaacagcataacccatctcctcttgtgaagatggggttttatcattcacatagagaattaaagcttggcatatacagtccttatttgagctaaacttaggccaaaggactgaaggctgacaaatggactttttaggccagataaaacagcaatacattattattttttgtttttccttatttcaggttttctagttatttttgagtcagttttggcaatttctatctttgtatgaatctgtccattttatctaagtggtctaacttattgacttcaggtttttcagagtcttcacttataatgcttttgaatttctaaagggtcactagtgataatctctcttttgttcacaattttggtaatttatctcatttcttatcatctctgttttgactgttggtcaagaaaacagacagaggcagcagatggctatgtgattctctagtgggaaggctttgatcatacatggctggcaagccagactgatggcagcaaccccaaaggagctgccaagggatcttgacaggaaagtcactgactctggattgggctatgctcaaccaggggaagaggtcaatgcttcaagggctatgaaatcaccagaaaaaaagagattgcaccaatgtggactgctgagtcccatttctttacgcaagaaaacacactttacagcctcaaatggctaacaatgcacagggagatgtcctcctcagaagaaaactttgatagaaaattgaaatggtcagttgaagcattgtttgtctaaaaactggcaatatagttgttgggcaatataaacatgaaggactggcttttacatcttcatgaatgtgctcactgtccacatgggtggggctgcaagagtgactcctctagatagcttcctctcttttacctgatggatcaggacgatgctgttatgactatacatacaattcttctgaaggggagaggatgctggaataatgactacgcttcacctcaaatttcttttttcatatgtgatgcagtggtaccaggaatagggatgaaaatcaaagtgccagaaacaggaattatctttaagccaaaaaccataactatatatttacatctttatataagaattcccaagcaactcaaagatggtgctatgccttcatttcatctggcaaagtcaggattaacagtaaatagagctatatagcctggtagtcagatggcccccactagttccttacctacataacctaccctctatgaccaagagtagaccgagggaaggcatgctagaatactattgctgcctgcagtctaggtcagcacagcagacaaacctgatgtcacctctaaaactggaaaagactgatataaagggacagaaggaggaatagtggctgagggtaagtgaataaatcaaagggttatataatgaggaaaattcaatattagcttaactcctcaaaagtgctgtgagcaagagaagatattgtctcttaggtcaattatactgggtgcctaaaagagtgaagccatatgtccttgagaccattcttgtttttggagcctggtaaggttgagtggtgtctgcaaacctgagtgacttcattctgggagacatattcatacgagaggatggtaaactgttctaattttgaatgactgaatgagactctgataatacgccaatacctctttacttttataatccttttcctataaaagatatgtggtcaaagaaaagcgggtaatctgaggtaaaacaaaagcatttagtctttgtccctggtttctcctaaaaaccttagaatctcttgcgtgataagagttagaatattaatgagaggactcatggctgagcggaccctggatatcttgagaatgggggctggctgccagagacacatacctgtgatgagagcgctgtcttattccattttgtgttgctataaagaaatgtcagagactgactaatttatataaacaaggttcatgtggcttgggattctgatgtctggaaatgtttgagcatttgatgagggcctcaggctgctcccacccatggcagaaggcaaaggggagctggtatgtgcagagttcacacggtaagagaggaacagagagcttaggaagttgccaggctctttttaacaactggctctcttggaaactaaaagagtaacaattcattcacttccgagagaggacaggatctctttattcataaaagattggcccccatgacccaaacagcacccattaggccccacatccaacactgggggtcagattttaacatgaggtatcagggggtaaatatttatatcattgcattctgtccctagccagccagagctcatgtttttctcccattgcaaaatatgataatttcccaattgtcccaaatgtgctaggttgttccagcatcaactcaaaattccaaagtctcatctgagactcaaggtaagtccctatagctgtgagcctgtaaagttttaaaaaggttatttacttctaaaatattaatacaacagtggaagagacatttcttatacatttccattctaaaaggaataaatgggccaaaagaaatgaatgcagtgtcctcacaaagctgaaactcatcatggaagatgttaaaatttaaagctctaaaataatctcctttgaccctatatcttgaatcctgagcacactggttcaagtggtgggctcacaatgccatttgcagccccacatccttggctttgctgaacataacccatatagctgctctcatgggtgaaaattgaatacctatggattttccaagctgagcttgcacattgccagtggctctaccatttagtagtcctggcaggggtcctgctcctgcagctccactgggaattgtcctggatattaaatttcccctttaaatatcagttccagtttcagatcatttttttgctcacacatatgtgcatagactattacaacaggaagccaaatcttgaatgctatgatgcttagaaatttcttctatcagatacccttaatcatcaccctcatgttcaaagttccacagatccctaaggagggggcagaatgcctccaagttctttgccaatgcataacaaaagtgaccttttctctaggtcccagtaagttcctcatctccatctaagacctcatcagcctgggctctattgtctatatcactatcagcattttggtcacaacaatttaacaaacctctaggaagttccaagttttcccccattttcttgtcttctaaactctccaaactcttccaacctatacctgttacccagttccaaagacattttcacattttcagctacgtttattgcagtacccaacttctggtactgattttctgaattattcattctcaactgttataaagaaatacctgagactgggtaatttataaagacagaaggtttaaattggctcatggttctgcaggctatatgaaagtatgattccggcatctgctcaacttatgagagggcctcaggaaactttcaatcatgctggaaggttaaggggaagtaggcatgacttacaagcctggagtaggagggagagagagcagggaggtaccacacacttttaaacaccagacgttgggagaactatcacaagaacagcaccaaagagatggtcctaaactattcatgaaggatccatcctcatgagccaatcacctccctgaggtgccacctccaaccttagtgattacaagtgaacatgagatttgggtggggacacagatccaaacaatatcaggggtcatggtggacatgaaggtgggctggtctccccacttctcacatgataccagggatgtagacacattcagacgccttggcagaaagagaagacagaggcccttgaagtcacaaaggggagacatgaacaaatcttgcatctcagtccctcacaaggcagtcttagaaaaaaaatagtcatgagcaaattcagaacagtcatagtaagtggtgacactgaacagcccaccacaccctgaaaaattccaaatcaaagaatctccagagcctagttgtgtcccctatgccccagctcctccttcccttcaggccccctaagttgtcattttacaagccttgagagacacatcagagccctgggtactgtccctgtttggggtggaacaaaaacaaaatctggtcagagcccacagatgatgtgactaaaggaggaattgtggggtggtgagctcccccatgggctcctgtctacactatcccaaggatctcagggatcactcttcccacccctaccacacttgcatgaagcctgagcatagctgactccttttccatctgtggaaagaaaataaactgtgaaaggccaggaaggaagcagggtcatgagatcccagaggagtgtccagaactgtgactgcagacccaggtcagaatcaggaaaccctaggtaagaggatgtgttgaaactggactaattgtcctagtgaggtctgtcctctgcgggtaccttcccctgacctgtgactgctgggagtcaggttctcatgactccaatgaaggtgataaatttgtccttcattttcacaagttctttacaaaagagtaagtgttgatagacagagatggtgcctcacgactaggcaggatacaagccaactcccatctggggctgggaatccaccaatggaagaagaaaactcggagctcacccctttcctacctgggctcttactcttccacatcacagcagtgaccacagctctggtgaaaacagcaccaagaacaaccaggacagtaacgatgcccatgatggggatggtgggctgggaagacagctgtaagaaaggaggggaacgtgaggggccctgaccatcaggcctcaaaccctgaccttgctgaagggctcctagttcccgtgagaagagacatgacccctcatctccttccttacccatctcagggtgaggagctctggcagcccatcgtgctgcacatggcatgtgtatctctgctcctctccagaagacaccaccacagctgcccacttctggaaggttctgtaccctgcaggtgtggtctccacaacctctgcatcctacatttggtcctatccatcccactactgggtcagtgtgatctccacagggtagaagcccagagcccagcacctcagggtggcctcatggtcagagatggggtggtgggtcatgtgagtcttttggggttctgaggggaagagtcagaaaattcaggcactttgcattcctcatgggacattccacctcatgggaccatcctgaaaattgacgggacacctgaagtggggaagggagcaactcagacaccagtctagacccaggcacctggggcaatcttctattccttagaaagttttagtgtctgaggccggaacagagatttctggtcctgacctgagcggaggccgaggtcaaaaaagctggaatcagacccacaaatacacattgagtgtgaggcagagaacaaggcctgagaggaaaattcctggtgcccaaggctgctgtggggacaaaggggaccgcagatcagtatttcagggattgtcttcccctcctttccctcaaagacttcatcctttaattgtcccagagtgcagggcaggccctcagtcactctctagtataggatctgaaaacccgggaggactcttcctcctcacaagagggagagggatgttttagcgttggtcccattttccttcccttcttttggaatgtgactcaaggagatctgcaggagatcagggaggcaccccgtggccactggtacctgggcagtgcagcgtctccttcccattcttaaggactttgctgagccactccgcccaccttccctgcaggtaggtttcgagcagctctgcatgttcctccgccagggcatctgagccgccttgtccgctgcagtccaggagcgcagttcctggtttcggacgaggtaactggcgccgtcatagggtatgttcatacccactgaggaggctgcagtccgagtccaggtcgcagctgtgtacccattggagggtgtgagacccattcccagcgaccgaggtcagcccaggccgctgagccccgcctcagcctcgaccaacccccggggatttgggcctgaactgaaaatggaatccggtataggcacctggggcttttatttggtggaggatctccgctggtcccgcagcggagtagcacaatcttagtaacagtgggtatcacagtacagtgggtagcacaatcttggtaacccctgaatgatcgcgaatctaatttgtaaaagaggtgatttttggccccattatatataaatgtgtctaaacgcattgcagttagactcacaaagttaagttttactttcccagactgtgtatctgtgactctggtctgttgtatttttaaattatctttatcttatagccctgagtttgtgtgcgcgagtccaggacatctcaatacaaagcacattgtgttaccgtatattgcaaccaggagcctgggcagaatttaatcacctcaaatttgcaagtgctcaatgcagccaaagtgcccttcaccagtgctcatgcaccgtctttatttatttatttattatttatttatttatttagttagttagttagttatttttagaccgagtaacactctgttgccctagctggagtgcagtggcatgctcatgactcacggaagcctcgacctcctgggctcatgcgatcagagctcctccttcagcctccaagtatctggcaccacaggcttgtaccaccactcctggctaatttttctaaaacaaatttgtagagatgaggtctcactatgttgctctggctagtcttgaactcctgagctcaagtgatcctcctgcctcagcctcccaaaatgctggtattacaggcatgagccacaatggccatctcatgcacctgcctatatttatgaattattcacatctaagctatgtgcatattttattaggacacttggtattcttttctaacctgtttatcataaggaggcaattagttattagacagccccacagaatgtattaaagaccaaggtgcaagtaacactgtgccaggctctgcagatgaatgcattacaaatctataaaaacactgtgtttaagtctgagaattctattgctttagaattctttctctctgttcctttacctcacctcctgcttctccagcccttctctctgtccctgtcatctctcaggccttcctctccccttagtctctactactctgtcactactgaattgtggccctaggtctgtcccctcacctgctgcccatgactgttctccccacaatggtcagaaatcctgctaatgtgagttagattgtgtcatttcttcacttaaaaccctccaatggctccatctcactctcaagaagcctctagaatggaaggcacatgagcacaggggctttgggttgttttgatcaaagttgttcctgcagcctataaaagcgtatctggcacatggtaggcactaagttaattttcttgaatgaatgaaatatgattgtgttaaaaattgtgtcacacaaaaatcacaaaatgaaaaatgcaaagcaagtgaggaaacatttggttttattcaactactatgcatatcagttcataaattcattccagtggagaaaatgtcatatgcttagctgttgaatctgtttatgaattttctattagtacataacaaattaccacaaacgtagtggcttaaaagagcactcatttatttgtctgcatttccttcatcagaaatccaggcctagtgtgagagattctttgttcagggtttcgcaaagctgtatcctcatcttaagattgggattctcccccaagcttatatagagctcgttggcagaattcggtttctggtaattgtaggactaaggtccccgtttccttcaggctatcagagtagacagtggggagggcttctaattcctattggccaccagtattttttccccatgatccctccattttcaaagcccacagtggaggaagcccctcacactgaatccctctcacactgtgagtctctattctcaggaagaacccagtcctttttagatcttacctgattaggccagtccaagcaggataatccccatcttaaagccaactgacaggggacctggaatacatctgcaaaatcccttcacagcagcacctacattagtgtcaacagagtaactggggtaacgtgagtaaccaacggtggttattggggtgtcatcatagaatcagtctagcatagcctggatcttccttttgtgtttgaatagaacatacaaattgaagttaaaaaaaatagatcattgttaatgataataaaatatatcttatataaccatgaaaattcttgttaaatattaaaagcaaatgacatgtttaatatcttataatcaatttagagcaaatgaaaaagttcaatgattcatcctctcttgtgaaggtgtattagttagctactgatgcataacaagtcacttaaaacttagcaactcaagtcaacaaatatttatcatgtcccacagtttctagtggtcaggagtccaggagaggtttctcaaagttcttctggctcagggcctctcacaaaattgcagtgtagttgtcatccagggctttatcatctgagggctcaaatggggctggggattcacaagtcacaagaatatcccacgtggctgttggaagaggcatcttcttattgtctggccccaggaggcctcacttcctagtcacttggagctttccacaggcctgcttatgacacagcagccagcttcccccagggctcatgatcccggagaaagagaaaaccagaaccaaagtagaagctgcagtgagcttttttgttttttgttttctgtttgtttttttttttttttttttttgagacagagtctcaccctgtcacccaggctggaatgcagaggctggatcttggctcactgcaacctctgacttccaggttcaagtgattctcctgcctcagcctcctgagcaactgggattacaggcatgcaccaccacacccgactaatttttgtatttttagtagagacagggtttcaccatgttggccaggctggtctcgaacttctgacgtcatgatccgctctcttgacctcccaaagttttgggactacaggcgtgagcgaccactcccagacttagtgagtcttacgatttacacccagagtcataaactattatgtcagcattactgtatcagcctgtaagcgagtcattaagttcaggccacactcacaggaagggaatgaagctgcacctctgcaaggaggagtatcaaagaatttatatgcatgttaagtatgtacagtatgcatgttaagtaatgtacagtatgtaatcacctcaaatttgcaagtgctcaatgcaaccaaagtgcccttcaccagggctcatgcactgcctctattatttagttagttagttagttagttagttagttagttatttttacacaaagtatcactgtgttgccctggctggaatgcagtggcatggtcatgactcgctgaagcctcaacctcctgggctcatgcgatcaacgctcctccttcagcctcccaagtagctagcaccgcaattaacattatagtttcaggattttgtaaatcaaatacttcttgtatctggctaattttctttaatactttaaaattatcttttgtaaagtaatgaataaaactttgagacagagaatggagatacaacaatatctcagatttttttgcaaatgtctttaatattaatgttctctttgatgagttacaagaaagttgagaaaatacagtagctagatcaaagagtcccaagactggtgccgtataataatgcctttacaatcataactatctttctttttcctcagaagttactaattccgtttaagaatgcccaaaatgccaattttcttactcaagcttctacaaaaatatttgcctaatcagggtgctttgcaattagaaaaaatgtgtctcacatctttgtctgtacagctagcttagcatcacgacaacgatttgatttgatgtggtaggtggaaatggttaactccaatctaggaacaagatttttcaaaaactgggtattcagtgggcatccattgatcagtttaacatctttcactgtgttttttttttttttttttttgaattttgggtaatgttattatttgtataaatatcttccaatacttgcttaaacacattacacataaatatgcaaatattgcttagctatactaaaatgttattcattgctcatcccaatttttttttttttttttttttttttttttttttttttttttttttttttttttttttttttattatactctaagttttagggtacatgtgcacattgtgcaggttagttacatatgtatacatgtgccatgctggtgcgctgcacccactaatgtgtcatctagcattaggtatatctcccaatgctatccctcccccctcccccgaccccaccacagtccccagagtgtgatattccccttcctgtgtccatgtgatctcattgttcaattcccacctatgagtgagaatatgcggtgtttggttttttgttcttgcgatagtttactgagaatcatggtttccaatttcatccatgtccctacaaaggatatgaactcatcattttttatggctgcatagtattccatggtgtatatgtgccacattttcttaatccagtctatcattgttggacatttgggttggttccaagtctttgctattgtgaatagtgccgcaataaacatacgtgtgcatgtgtctttatagcagcatgatttatactcatttgggtatatacccagtaatgggatggctgggtcaaatggtatttctagttctagatccctgaggaatcgccacactgacttccacaatggttgaactagtttacagtcccaccaacagtgtaaaagtgttcctatttctccgcatcctctccagcacctgttgtttcctgactttttaatgattgccattctaactggtgtgagatgatatctcatagtggttttgatttgcatttctctgatggccagtgatgatgagcatttcttcatgtgttttttggctgcataaatgtcttcttttgagaagtgtctgttcatgtccttcgcccactttttgatggggttgtttgtttttttcttgtaaatttgtttgagttcattgtagattctggatattagccctttgtcagatgagtaggttgcaaaaattttctcccatgttgtaggttgcctgttcactctgatggtagtttcttttgctgtgcagaagctctttagtttaattagatcccatttgtcaattttgtcttttgttgccattgcttttggtgttttggacatgaagtccttgcccacgcctatgtcctgaatggtaatgcctaggttttcttctagggtttttatggttttaggtttaacgtttaaatctttaatccatcttgaattgatttttgtataaggtgtaaggaagggatccagtttcagctttctacatatggctagccagttttcccagcaccatttattaaatagggaatcctttccccattgcttgtttttctcaggtttgtcaaaaatcagatagttgtagatatgcggcattatttctgagggctctgttctgttccattgatctatatctctgttttggtaccagtaccatgctgttttggttactgtagccttgtagtatagtttgaagtcaggtagtgtgatgcctccagctttgttcttttggcttaggattgacttggcaatgcgggctcttttttggttccatatgaactttaaagtagttttttccaattctgtgaagaaagtcattggtagcttgatggggatggcattgaatctgtaaattaccttgggcagtatggccattttcacgatattgattcttcctacccatgagcatggaatgttcttccatttgtttgtctcctcttttatttccttgagcagtggtttgtagttctccttgaagaggtccttcacatcccttgtaagttggattcctaggtattttattctctttgaagcaattgtgaatgggagttcacccatgatttggctctctgtttgtctgttgttggtgtataagaatgcttgtgatttttgtacattgattttgtatcctgagactttgctgaagttgcttatcagcttaaggagattttgggctgagacgatggggttttctagataaacaatcatgtcgtctgcaaacagggacaatttgacttcctcttttcctaattgaataccctttatttccttctcctgcctgattgccctggccagaacttccaacactatgttgaataggagcggtgagagagggcatccctgtcttgtgccggttttcaaagggaatgcttccagtttttgcccattcagtatgatattggctgtgggtttgtcatagatagctcttattattttgaaatacgtcccatcaatacctaatttattgagagtttttagcatgaagggttgttgaattttgtcaaaggctttttctgcatctattgagataatcatgtggtttttgtctttggctctgtttatatgctggattacatttattgatttgcgtatattgaaccagccttgcatcccagggatgaagcccacttgatcatggtggataagctttttgatgtgctgctggattcggtttgccagtattttattgaggatttttgcatcaatgttcatcaaggatattggtctaaaattctcttttttggttgtgtctctgcctggctttggtatcagaatgatgctggcctcataaaatgagttagggaggattccctctttttctattgattggaatagtttcagaaggaatggtaccagttcctccttgtacctctggtagaattcggctgtgaatccatctggtcctggactctttttggttggtaaactattgattattgccacaatttcagagcctgttattggtcgattcagagattcaacttcttcctggtttagtcttgggagagtgtatgtgtcgaggaatgtatccatttcttctagattttctagtttatttgcgtagaggtgtttgtagtattctctgatggtagtttgtatttctgtgggatcggtggtgatatcccctttatcattttttattgtgtctatttgattcttctctctttttttctttattagtcttgctagcggtctatcaattttgttgatcctttcaaaaaaccagctcctggattcattgattttttgaagggttttttgtgtctctatttccttcagttctgctctgattttagttatttcttgccttctgctagcttttgaatgtgtttgctcttgcttttctagttcttttaattgtgatgttagggtgtcaattttggatctttcctgctttctcttgtaggcatttagtgctataaatttccctctacacactgctttgaatgcgtcccagagattctggtatgtggtgtctttgttctcgttggtttcaaagaacatctttatttctgccttcatttcgttatgtacccagtagtcattcaggagcaggttgttcagtttccatgtagttgagcggctttgagtgagattcttaatcctgagttctagtttgattgcactgtggtctgagagatagtttgttataatttctgttcttttacatttgctgaggagagctttacttccaactatgtggtcaattttggaataggtgtggtgtggtgctgaaaaaaatgtatattctgttgatttggggtggagagttctgtagatgtctattaggtctgcttggtgcagagctgagttcaattcctgggtatccttgttgactttctgtctcgttgatctgtctaatgttgacagtggggtgttaaagtctcccattattaatgtgtgggagtctaagtctctttgtaggtcactgaggacttgctttatgaatctgggtgctcctgtattgggtgcataaatatttaggatagttagctcctcttgttgaattgatccctttaccattatgtaatggccttctttgtctcttttgatctttgttggtttaaagtctgttttatcagagactaggattgcaacccctgcctttttttgttttccattggcttggtagatcttcctccatccttttattttgagcctatgtgtgtctctgcacgtgagatgggtttcctgaatacagcacactgatgggtcttgactctttatccaacttgccagtctgtgtcttttaattgcagaatttagtccatttatatttaaagttaatattgttatgtgtgaatttgatcctgtcattatgatgttagctggtgattttgctcattagttgatgcagtttcttcctagtctcgatggtctttacattttggcatgattttgcagcggctggtaccggttgttcctttccatgtttagcgcttccttcaggagctcttttagggcaggcctggtggtgacaaaatctctcaacatttgcttgtctataaagtattttatttctccttcacttatgaagcttagtttggctggatatgaaattctgggttgaaaattcttttctttaagaatgttgaatattggcccccactctcttctggcttgtagggtttctgccgagagatccgctgttagtctgatgggctttcctttgagggtaacccgacctttctctctggctgcccttaacattttttccttcatttcaactttggtgaatctgacaattatgtgtcttggagttgctcttctcgaggagtatctttgtggcgttctctgtatttcctgaatctgaacgttggcctgccttgctagattggggaagttctcctggataatctcctgcagagtgttttccaacttggttccattctccacatcactttcaggtacaccaatcagacgtagatttggtcttttcacatagtcccatatttcttggaggctttgctcatttctttttattcttttttctctaaacttcccttctcgcttcatttcattcatttcatcttccattgctgataccctttcttccagttgatcgcatcggctcctgaggcttctgcattcttcacgtagttctcgagccttggttttcagctccatcagctcctttaagcacttctctgtattggttattctagttatacattcttctaaatttttttcaaagttttcaacttctttgcctttggtttgaatgtcctcccgtagctcagagtaatttgatcgtctgaagccttcttctctcagctcatcaaaatcattctccatccagctttgttctgttgctggtgaggaactgcgttcctttggaggaggagaggcgctctgcgttttagagtttccagtttttctgttctgttttttccccatctttgtggttttatctacttttggtctttgatgatggtgatgtacagatgggttttcggtgtagatgtcctttctggttgttagttttccttctaacagacaggaccctcagctgcaggtctgttggaataccctgccgtgtgaggtgtcagtgtgcccctgctggggggtgcctcccagttaggctgctcgggggtcaggagtcagggacccacttgaggaggcagtctgcccgttctcagatctccagctgcgtgctgggagaaccactgctctcttcaaagctgtcagacagggacacttaagtctgcagaggttactgctgtctttttgtttgtctgtgccctgcccccagaggtggagcctacagaggcagtcaggcctccttgagctgtggtgggctccacccagttcgagcttcccggctgctttgtttacctaagcaagcctgggcaatggcgggcgcccctcccccagcctcgttgccgccttgcagtttgatctcagactgctgtgctagcaatcagcgagattccgtgggcgtaggaccctccgagccaggtgtgggatatagtctcgtgttgcgccgtttcttaagccggtctgaaaagcgcaatattcgggtgggagtgacccgattttccaggtgcgtccgtcacccctttctttgactcggaaagggaactccctgaccccttgcgcttcccaggtgaggcaatgcctcgccctgcttcggctcgcgcacggtgcgcacacacactggcctgcgcccactgtctggcactccctagtgagatgaacccggtacctcagatggaaatgcagaaatcaccgtcttctgcgtcgctcacgctgggagctgtagaccggagctgttcctattcggccatcttggctcctcccccttcactgtgttttttaattagatgtgttagaagtgatttggactccagtatgattctgaaaaatgcagttattttgtgcttctaacattgctttaaaagcagctcttttgtgttttccattcttattgctatttcatcactagttattcctttatgtcttttcatttaatttattttgctcgacaatggttttttctattctgtaaaagtttaattcacttgtatgtgtggtaaaatgtgagcaacatatcaaattctcaaattctttgcgagatacaattgccttgcacatcagattgaacattgtataccagagaatgtagagagatgccaattagccaaggatcaaatgacctatttctagccaaggctatttttcatggcatcctggtcctctttgtcacatggctgcttacaattggctgtggctttgttttaacgcaggtagttatcgctaaggatcctttcaatgaacttttgtgttttcttttctctttcatttccaaataatcaggaatggcacacaaggtgcattttgaaaattgccactttaaagatttgtgggctgggagtggtggctcatgcctctaatcccagcactttgggaggccaaagtgggtagatcacctgagatcacctgagaccagcctggccaacatggtgaagcacagtctttacgaaaaatacaaaaattagccgggcatcatggcaggtgcctgtaatcctagctactcagaggctgaagtaggagaatcgcttgaacacggggggcggaggttgcagtgagctgagatcacaccactgcactcccacctgggcgatgagagtgagactccatctcaaaaaataaatgaatgaataaataaataaataaataaagatttatgatcaagtaactaactacctgggcatcctctcctggcataagaaacagaacctatgaagccaccctagactgttgtccaatcctatcccccaaaaggaacctctatcttgagtcttgtatttactattcctttgcattgtcactaaagatttttacaataaatatatatacccaaatcacagtctgacctgtttttttaacttccctgtagagagaactcacactatatgtattcttctgtgatgcaccttatgtgtaggagagttatctctgatgtgggtgggtgctgttcattcatttttactgctgaagttttacttttcatgattatatcacaattttgttaattcccattgatgtatatgtgatcgtttccagtttttgccataaacattggtgtacacgtctccaggacacatagccaagaattccccagagtgtatgatcaggagcagatgatgggattatacagtgtatggaccttaatcatactagataaggctaatttgattcctcaagtgcttgtaccaagaatgggaaagaacttatgttgctcatgtgttctgaaaacactcagttgaaggtggagattacatgtgaaaaaccactgtcttggctacagaatcaccctaggcattttttcatattccattaataacttccttttctttacttttatcctgtaaattatggcattatactttaagcataagattcaaataatgcttctttttagcctaaccacatagagtttgtgaaaaaatggagggagggagaaagctctgagggaggaaaggaggaaacaaagatggaaggacagagaaagacaaaatgaacattttcaaaaaagaataggaggaaaggattagaaacagcaagtgtggctaacattattaaaatgcagggaattaaaagatgtagataacatccatggaataatagaaacttaagaaagccttaatagttattaactgctgtgtcacaaactacctcaaaatttagtggcttaatacaacaaatatctgttaattcaaagagatactaaaaacacaagcaagatagattttatgggggtggcagaagttagataaagagatggattttataggttggaataagtaaaagttattggtgtgcacatggaaatgctttttagtccaagtcctccaaggagcagatgccaagatgagcttaaagtctgtggcatcttatgagggaacacacctgtaagggaatatgggaagcgagccagaaatccctggaaaaggcggcagacaatgatgcaagtgtgaccccaagtgctggacagaaggagacaaggtttgttcgacgcatcctagagcagaggcaatctaaggagagttgagcaagggcatggaggagtcctggagccacatttggccatcagaggagtcctgtgtctcccagaaatggcctgccttagtgtgcttgctgtgaccagtcactggctgggaacaactcatgggaagcagggcttctgcactaatcctgctgaggatgtcagagcacaggagcagagatgtgggacattacctaggtgtatcactcaatccttccttcctgagggttctgggctcttgaatatcaaaccctctcaggctgggttgctggatgattctgctcacacttacaacggacaagggaaaccaggatgtccccaagtggattcctggtttccacacacacttctcctgccctcattgtgtgatagcagccctgcctcctcctcttctcccctgcttgtctctgggcatactattcaaatatccctgggtgcaaccacaatgtttagttccatggactctcatttgtctccttgccagggtgccctctttgggaaaccaggacctcctcccctgcagagtccagattttggacgtaagaagagcaaaatcaccctgggggtgaatataatgaataaaataaatacataaataaataaatttatgtatgtatttatgttatttatgtatttatttatttacttataaataaataaatcaccctgggggtgaatataaggaatgagacacacctgctttgacttcttggtttttggacccacatattcttccttctgaaaacggcaccacagagacgtctttgattcaatacatgcttcacatcccgaaagatggcacccattcctcagagggtttcatccaagctggtactgagttgtgtctgcagagacctgtccatgactctgtgtgcctggcagcacctgacaggcgcaggtggtgatatgaccaggggatcccatggatccccttccccatgaggtgtgtcccccaggcagataacgtactgaaattttgagccagtggatcaggaatgccaatagtgttgttgactgaggatctgaaagcagagaggaaaaccacaccacatcgaataggtgcctatccctgtgaggatgaacttctgccccttccaggatagatggtgttcaagctattcaacttgtcacttaggggctagtcagttacctgaagaaatagtgccctatcggtgtctatcattggtctgtaatgctcacaagcagagtattcagaggaagcagtagctggatggccttggtagtggagagacagtgctgctggactcatttgtagcttcatccctgccactgtggttgctccactcacgggtccttcctatcaggcctgggctgatccatgatgcagactggctaacttcaatttgtttggttattcagggccacatcaggactgggtgttttctgtgggtgttaacatggaattgaggctcaaccgacatggaccattttcgtctcatgatagatgccgctgggcctgtccaatctatgactctatgggtcacatagaagtcaatacacacaggcacttggaaacacatggttgcttggtgtcccatgatcaagcattctatcttatcagggccagtaacatgctaaaagttgcttctaacatggagcatgtttctccatgcttctaacatggagctgtggactccatggccttactccagatcccaggccctccattctgactctcccactgatgcttggttcagctccatcctgcatctttccccagacagccacctccagcaccaggggtctgagggatggtgactgactgcaccacagtctgggtctgctgcaatgtcctttcccatcaggccccactcaaagctggcctcctcctatatcacccagagtgtcggccaaagcaatatacttagatatggaaggtggcattgccagaacacagagaggctcagaaggtagtgtgcttccttccttctggtgaggatgcaagatgcaagtttgtcttttactttggaggggacagccctgcatgcccctaaccactggacccataacacttcactgcagtggccactcttgaagctctgtaaagtttatcttcaccttctctagtgcacatgttttgccaaggaattcagcgtactttcctgctcttgttcatccttcccaatttatgtgatattcccaatgaaatgaagagatttagtgttctgtgagatgtctgatttgtccaggtctcttaaggtgatatttatagaaggttgaggagttaaggtagccctgatgcaagctatcaataaatgtgttataaatcccatgtgaatgtgaatcattccatatccatcttttaaatgaaatgggagggaatgcactcaccaaatccacagctgcatgccatgtgcctgagtccttattaatctccccaagcagtgatatccagtcagcatggcagctgcaatcaggactcctacttggtcaagtctggtgtaattccattcattctttagccatatcaggcttctgcaggtacagattgctgagttatatggagataagaggcaatcccaacaccaccctgcatcgttcaggcatgtaatggcagtgccacccctatactacctgcagtaccctccacaagacccaccctggggcacaatattgcttctggttcagcttggatgagggatgtttccctttgggcttcagcacaatgagatgccttactctccagactagggacacagtgtggggtgactccagttgccagtgcatcaaggccaattatgtactcagagaatggggagataaccaggacaggatttatggaaccggtgattccaccatggggcataatgtgtctaggtttattccctggcctctgtaagccccactgtgatagggacataatggtgctgtgggaatctgggcagcaatgtcagctcacacccaatgttaatacttatcccatctcctgattaaatggctataggctcctttgcagaagggctgatggaattgtcccagcatgtaaccatcatcgtgtcccaaggttctttctcttagggatatagatatgtccttagtcactggattctgaatctgaagcttgctcctcaattccacatgcttatcatagatatcaagaagtgcccttgctgtctgcccatcttttctgaccctgggacaccaccctttattaaccttccccacaactccttgaaggtcaagcccccttggctgatactctgggttatcacagtaaatgtgccctttatcttttgcaggtcactgaaaaggagggttcctaaagcattcactcctgaccctgagggaggtgggtgcactcactccaggactcaggtgcaccacagataagcaaaaaagtcctcacattcaaaattgtcctgggccacatgcagcccacgagccacgggttggacaagcctgcatctagaacgtatgcaccataatcccagaaatttttctgtttttactttaaggatgctttctaaatgcaaaagcagtcatatccctagcagacaacaaatgtcagttgaatgaatgatcactgtagagcacctccctattctaaagcccatacctttattaatgtagccacagggcaaatgctgttttgtggcagctaaagaacataagttcacatggacatccatgccgccagtgcttttctcaccagggctgcttgtgtgtcctccctcctcccacaccaaccctcctgcacacttcagcacaaaaccatatatttctcttcaggaacaataaccctagccttatgggtacaattttccaaccacatatgaatctaaattagactctgctttataaatctatgagtttggattggagccagcattaggattactacaactcagagcaggaagaagagtaggagggcagaagaggagttccaacagaaagttaatcatgatgagaaactatgggacccctcctctctgcaaatgtcacaatctggttcctttaaaaagattggagaaaaatcaaaaatacaattgaggaaaaagccctgggaggaaggcaagacctggacaggtctgaaaatttgtctcttgataccacaaggagatttgtatgcagggaccaccgtaggtgacatccaactccctgtgatcacaggtcttggtgggacaagtttctactgaagggccaaggacaatggagcagcaaagatgacccagccaagcagtgaccacataaagcccatggtggccggaacagaaactgggcacagccccatctactctcctcccctgcaacaaatcagcataagcaacacgtggactctggaaggttctcatgtgttccatttattttgtctctcaaattttaggaatcttctcctttaattaactcatcaacctctcatggcaagaatttgagaaagtaaatttatactcaggttctaattttaatagggaaggaagaagttacagctcagtgcaccatgaagttgaggcagagatggagacacctcagccccacctctctggaacaggaaagatgattggggagggagcacaggtcagcgtgggaagagggtcatggtggacatgggggtggggtggtctccccacctcctcacattatgcctacaagaacacagacacatgcaggtgcctttgcagaaacaaagtcagggttcttcaagtcacaaagggaagggcaggaacaaatcttgcctctcagtcccacacaaggcagctgtctcacactatagaaaaaaatattcatgaacaaattcgtatctgtcacagtgaggagtcacactttaaacagcccatcgcatgctcaatacatccaatgcaaagaaaccccatagcacagctgcgtccactgttccgcccaacacccaacacacatcaggccctccaggctctcacctttacaagctgtgagagacatatcagagccctgggcactgtcactgcctggggtaggacaaaaacagaacctggtcagatcccacagaagatgtggctagaggaggaattgtggggtgggtgagctcccccacgggctcccaaacacaatatcccaaggacctcaggcatcagcctccttcatacttacttgcagcctgagagtagctccctccttttctatctgtgggaagaaaatgtcctgtgagataccagaaaggagccagggccttaaggtcctagaggaacctccaagtcttggacctcagagaagtttccagaaatgtgtgactgcagacccagggcgggatcaggaaacatgaagaaagcaggtgtgggtcctggaccaaccgccctcctgaaggtcctcagggaccttcccctgtgacttgtgactgctgggatcaggtcccatcaccgccgtaatcaaggtgataaatctgtccttcattttaacaggtgctttacaaaagagtaagtgctggcacacagggcccaggctgggtaggcccataattgtggatggtgcttcccagtaacgaggcagggcacacttctacctgggtcttggaaccctcagtgagacaagaaatctcagacccacccttcatcccttcaccccacctgagctcttcctcctccacctcacagcagcgaccacagctccagcgaacacagctccaaagagaactaggccagcaatgatgcccacgatggggatggtgggctgggaagacggctctgggaaaagaggggaaggtgaggggccctgaccctgctaaaggtcagagaggctcctgctttccctaaaagacatgacacccccatctccctccttaccccatctcagggtgaggggcttgggcagaccctcatgctgcacatggcaggtgtatctctgctcctgtccagaaggcaccaccacagacgcccacttctggaaggttccatcccctgcaggcctggtctccacaagctccgtgtcctgggtctggtcctccccatcccgctgccaggtcagtgtgatctccgcagggtagaagctcagggcccagcacctcagggtggcctcatggtcagagacagcgtggtgagtcatatgcgtcttgggggcgtctgtcaggaagagtcagaacattcaggcattttgcatctgtcatgggacactcctccagcacacatgtggctatcttgagaatggacaggacacctgggatggggaagggagcacagaacccagacaccagcctggacacaggcacctgggataatctcctattccgtggaaaattctagtccctgaagagggaacagcgacttctggtcctgacctgagtggaggctgagggactcagaagtgctggactcagacccccacacacattgagtgtgaagcagagaacaaggcctgagaggaaaagtcacgggcccaaggctgctgccggtgtgtgtcaaagggaaccactcatcagtattcgagggatcgtcttcccgtcattccttcagagattttatcccttaattgtgtcagagagcagggcggaacctcagagtcactctctggtacaggatctggaaacccaggaggattcctctccctcaggaccagagggagggcgatattctagtgttggtcccaattgtctcccctccttgtgggaggccagcccgggagatctacaggcgatcagggaggcgccccgtggcccccggtacccgtgcgctgcagcgtctccttcccgttctccaggtatctgcggagccactccacgcacgtgccctccaggtaggctctcaactgctccgccacacgggccgcctcccacttgcgctgggtgatctgagccgccatgtccgccgcggtccaagagcgcaggtcctcgttcaaggcgatgtaatccttgccgtcgtaggcgtcctgccggtacccgcggaggaagcgcccgtccgaccccacgtcgcagccatacatcatctggatggtgtgagaacctggccccgaccccacggtcagcccagtcccccgagccccgtccggccccgaccaacccggggggatttttggcctaaactgaaaatgaaaccgggtaaaggcgcctgggcctctcccggggcaagggtctcggggtcccgcggcttcggggtggatctcggacccggagactgtgggcgacccggcccgtccgtgggggatgagaggtcgtgacctgcgccccgggccggggtcactcaccggcctcgctctggttgtagtagccgcgcagggtccccaggttcgctcggtcagtctgtgactgggccttcacattccgtgtctgcaggtcccaatactccggcccctcctgctctatccacggtgcccgcggctccatcctctggctcgcggcgtcgctgtcaaaccgcacgaactgcgtgtcgtccacgtagcccacggcgatgaagcggggctccccgcggccgggccgggacacggatgtggtgaaatacctcatggagtgggagcctgggggcgaggagtggctgagacccacccgaccctcctcccggcgcggctacccgggtcctgcgtccccgccgggcgggccccttgcttctccccgcagaggcggtttccccacgaccccgcactcacccgcccaggtctgggtcagggccagggcccccaagagtagcaggaggagggttcggggcgccatgacggccatcctcggcgtctggggagaatctgagtcccggtgggtgcgtgcggactttagaaccgcgaccgcgacgacactgattggcttctctggaaacccgacacccaatgggagtgagaactgggtccgcgtcgtgagtatccaggaagaaggaccctacataggttggcagagggagaaaagaaactgcggagttggggaatccccaaggctgggactccccaatccatacaccgccttcggggcctgagaccctgagagccacgcctggggccctgggacttcgccctgacccctctgctcctgtgccaagctctctgtctcaatgtctccctgagtcttggcccaagagctgtctgagaaacaagggagaaaccctcggcatgggccccgtccctctcctttcacttttcatcccgtaatctctgtccctgaactggactccctgactcccactccttacctgtccacctggactcttctagaagaaaaatcaccccatggagtttggtgccagagagtaagcttgctctgggaatggaggtgtagatttttgttgttgttgtttttgtttttaatcgggaaaagttgcgcctgagtgcatgagacagaatagagaccaatttgctctttgtttattaactacagtgggtagcagaatcttggtaacccctgaatgatcaggaatctaataggtaaaaaatgtgactttggccccttgatgtataaatgtgtccaaaagccttacaacaggactcacaaagctactaagtttcactttcccagacaatgtacctgtgactcctgcttgtagtattttaaatttaccatcattccatagctctgagtttctgtgtgagtccaggacatctcctcaatacaaagtagccactgtgttcctatatgttgcgaccagaagccattacaagctttattcacctcaaatttgcaactgttcaatgcagtcacaatgcccttcactactgctcatgcactgcctgtttttaggaagtatccacttctaagtgttgtgtatattttataggaacacttagtaatttttaaacctgattaacataaaaaattaggttttaggcagacccacatgaggtattaaaagacaactgccaaggacaccctgctaggctctgtagatggatgtattaaaatccataaaacaatgtatttaaacctaagaattc

SEQ ID NO: 29 - DNA, 141475 bp, Homo sapiens
caagcttgaggagccagagaacaaagttggggcccaatacaagtctcccagcattagaacatgcagtccaggtgttgagagttgagccttgacctctaaaatctcccagaaacaaagccagttggctgaatgcatcttataccacaaaccctcaaggtcatcaaataggataaaagaaaatttaaaaaccatccaaaggtcggcaacctcaagggttggaggcagataagcccacaaaaaatgagaaagaatcagcacaagaatgctgaaaactcaaaaagccagagtgccttcttctttcctctaaatgaccacatcacctttccagcaagggtttggaaccaggctgagattgagacagctgaaatgacagaattcagaatacggataggaattaagatcatcagctataggagtacattgaaacccaatgcaacgaagctaaaaatcatgataaaatgatgcaggagttgacagatcaaatagccagtatagaggagaatgtaaccaatctgagagagctgaaaaacatagtacaggagtttcataatgcaatcacaagtattaatagcagaatagaccaagtggagaaaagaatttcagagcttgaagactagttttataaaataagacaggcagacaagaatagagaaaaaacaatggaaagaaatgaacaaaacctccaggaatctgtgactgactggtgtccccgaaagagatggaaagaatgaagccaacttggaaaacatatttcaggatatcattcatgagaactttcccaatctagctagagaggccaacattcaaattcaggaaatgcagagaaccccagtaagataatctacaagaagatcatcccaaggacacataatcatcagattctccaaggtcaaaatgaaagaaaaaatattaaaggcagctagataaaaaggtcagattacctacaaagggaagcccattagactaacagcaaacctctcagctgaaaccctacaagccaggagagattgtgggcaaatgttcaacattctcaaagaaaagaaattcctactcataatttcatatctgtccaaattaagcttcataagcgaaggaggaataagatccttttcagacaagaaaatgctgagggaatttgttaccactagacctgccttacaagagctcctgagggaagcactaaatatgaaaaagaaagacttactagccactataaaaacacactgaagtacacagaccagtgacaccacaaagcaaccacataaacaagtctgcaaaataaccagctaacatgatgacaggatggaatccacacatatcaatactaagcttaaatgttaatgggctaaatgtcccaattaaaagacacagagtggcaagctgaataaagaaccaagactcattagtatgctgtcctcaagagacccatctcacatgcagtgacacatataggctcaaaataaagggatagagaaaaatctaagcaaatggaaaacaaaaaaagcaggggttgcaatcctagtttctgacaaaacagactttaaaccaacagagattaaaaaaaaaaaaaaacatgaagaagggcagtacataatggtaaagggttcaattcaacaagaagatctaagtatcctaaatatatatatgcacccaacacaggagtgcccagattcataaagcaagtttgtagagaccttcaaagagacttagactcccacacaataatagtgagagactttaacatcccactgatattattagatcatcaagacagaaaattaaccaggacgttcaggacctagactcagcacgggatcaaatggacctgatatctacagaactctctaccccaaaacaacagattatatatttttctcatggccacatggcacatactctaaaattgatcacacaatcgaagtaaaacactcttcagcaaatgtgaaagagttgaaaccataacaaacaacctctcagaccatagtgcaatcaaattagaaatcaagactaagaaattcactcaaaaccatacaattacatggaaatcgaataacctgctcctgaatgactttgggggtaaataatgaaattaaggcagaaatcacgaagttctttgaaactaatgagaaaaaagatacaacataccagaatctctgggacacagctaagacagagttaggagggaaatttatagcactaaatgcccacattgaaaaagttagaaagatctcaagctaacaacctaatatcacaactgaaagaactacagaaccaagagcaaacaaatcccaaagctagcagacgacaatccgagctgaactgaaggatattgagacatgaaaaaccattcacaagaccaacaaatccaggagctggttttttgaaaaaattaataaaatagactgctagctagactaataaaaaagaaaagagagaagattcaaataaacacaaaaagaaatgacaagggggatattaccactgaccccactgaaatacaaacaaccatcagagaataatatgaacacttccatgcacatgaactagaaaatttagaagaaatggatgaattcctggacaaatacaccctctcaagaccgaaccagaagaaactgaatccctgaacagaccagtaatgagctctgaaattgaggtaataataaaaagcttaccaaccaaaaaaaaaaaaaaaaaaaaaaaagcccaggaccagatggattcacagctgaattctaccagatgtacaaagacgagctggtaccattcctactgaaacaattccaaaaaaattgaggaggagagactccacactaattcattatatgaggccagcatcatcctgataccaaaacctggcagagatgcaacaacaaaaaagaaaacttcaggccaatattctcaatgaacattgatgtaaaaatccttaacaaaatactggcaaaccaaattcagcagcacatcatgaagcttatccattacaatcaagtaggctttatccctgggatacaaggatggttcaacatatgcaaatcaataaatgtgattcatcatataaacaggactaaagacaaaaaccacatgatgatctcaatacatgcataaaagtcttgataaaattcaacaccccttcatgtcaaaaactctcaataaactaggtattgaaggaacacactcaaaataataacagccacgtaggacaaacccacagccaatatcgtactgaatgggctagaagcattccctttaaaaatcagcacaagacaaggatgccgtctctcaccactcctattcagcatagtattggaagtcctggccagggaaattagccaacagaaagaaataaatggtatccaaatagggagagaggaagtcaaactatccctgtttgcagacgacattatcctatatctagaaaaccccatagtctcagcccaaaagcttcttaagctgataaacaacttcagcaaagtcttaggatacaaaatcaatgtgccaaaatcactagcattcctatataccaacaacagtcaagccaaatcaggaacatagttccattcacaattgccacaaaaaaaaaaaagtataatatacctaggaatacagctaatggggaggtaaaagatctctacaaagaaactacaaaacactgctcaaagaaatcagacatgatgcaaacaaatggaaaaacattctatgctcacgtataggaagaatcaatattgttaaaatggtcatactgcccaaagcaatttatacattcaatgctattcctattaaagtaccattgagaatcttcacagaactagaaaaaactattttaaaattcatgtggaaccaaaaaggagcctgaatagccaaggcaatcctaagcaaaaagaacaaagctggaggcatcacactacccaacatcaaaactgtactacagggctacagtaaccaaaacagcatggtactagtacaaaaacagacccatagaccaatggaacataatagagaacccagaaataagaccacacacctaaggctatctgatcttcgacaaacctgacaaaaacaagcaatgaggaaaggattcctaattcaattatgatgctaggataactggctagccatatgcagaagattgaaacttgacccattccatataccatatacaaaaattagctcaagatggattaaacacctaactgtaaatcccaaaagtataaaaaccctgaaagacaacctaggcaataccattgaggacataggcacaggtacaggtaaagatttcatgatgaagacaccagaaacaattgcaacaaaagcaaaaattgacaaatgggacctaattaaactaaagagcttctgcacagcaaaagaaactatcaaaagagtaaacagacaacctacagaatgggagaagatttttgcaaactatgtatccaacaaaagtctaatatccagcatccataagtaacttaaacaatcttacaagaacaaaacaatcccattaaaaagtgggcaaagggcatgaacagacacttttcaaaagaagacatatgtgtggcaaacaatcatatgaagaaagctcaacatcactgatgattagagaaatgcaaaacaaaaccacaatgagataccatctgtattagtctgttctcatgctgctaataaagacatacccaagactgggtaatttagaaaggaaagaggttgactcacagttcagcgtggctggggaggcctcaggaaacttaaaatgatggctgaaagggaagcaagcatgtccctcttcatatggcagcaggagagagaagaatgagaactgagtgaaagggaaagccccatataaaaccatcagatctcctgagaactcactcactatcatatgaacagcatggggaaaaccgtgcccatgattcaattacctcccaccacatatggggattatgagaactacaattcaagatgagatttgggtggggacacagccaaactctatcaccatctcacaccagtcagaatggctattaaagtaaaaaaataatagatacttgtgagtctgtaaagaaaaaggaatgcttatacactgttggttggagtgtaaattagttcagtcattgtggaagacagtgtggtgattcctcaaagacctaaagacagaaatgccattcaacccagcaatcccattactgggtatatacccaatggaatgtaaattgttctattataaagacatatgcacatgcatgttcattgcagcactattcacaatagcaaagatatggaataaacctaaacgcccatcaatgatagactggatgaagaaaatgtggtacatatacaccatggaatactatgcagctataaaaagaatgagatcatgtcctttgcaggaacatgggaagagccagaggccattatgcttagcaaactaatgcaggaacagaaaactaaataccacatgttataagtaggagctgcatgatgagaacacatggacacatagtggggaacagcacacgctggggactgtcagagggtggagcgtgggaggaaggagaggatcaggaaaaataactagtgggtactaggcttaatacctgggtgatggaataatctgtacaacaaacccccatgacacgagtttacctatctaacaatcctgcacatgtacccttgaacttaaaagttaactaaaaagagatgtgagtggagacaaacatacaaactatgtcacaggggaggcttagaattactttttcagaatggggctaggaaaaggaaacatataacttccctctgcatgattgcctgttctcagtgttgacttcctgagggggctcttctccagctgttaataatgccccaagggtgttaactgaccttggcataaagtgctggatacacatctgttttaacaaaagccttttaaatatcacaaagctttgtgagccccaaaagaataaaatgtcaatgatcttcctgacagatggaggtcgaacctgtgtgcatctgttcataaagctagtcttaacctgactggttcagtgagtatttattaagcatttggccatgccccggacactctccatgtgaggccctatgcaatgtgctgtcagaagcaggaagtgactaattttgcttgtgaagtattgagaaggttgtatgaaagaggtgacatttgagctggcctgaaagatgttgggaagtctggaaaatgcaaggtggcaaatagaattctagtcaaaagagcaccatcagccgggtgcggtggctcacacctgtaatcccaacagtttgggaggccgaggctggtgtatcacctgaggtcaggagttcgagaccagcctggccaacatggtgaaaccccgtctctactaaaaatacaaaaattagccaggtttggtggcatgtgcctgtagtcccagctactcgggaggctgaggcaggagaatggcgtgaacctgggaggtggagcttatactgagccgagatcataccactgcactccagcctgggcaacagagtgagactctgtctcaaaaaaaaaaaaaaaaaaaaaaaaaaaggcaccgtcatgggaacactatcatatagacatgtgaaaaagcacaatgtgttgtgaaaagtgcaagtggcaaaacgtggcccaatcacagcctgcattgggctagggatgcagggaaaagagatgacatgtagtgacttgaatgttggctccccaaaagatatgcccaccaggaacctgtagatataaccctgtttggagaaggactttgcagatgcaaataaattagtaaggatcttgaaaggtgttgtcttgaattgagtgggctctaaatccagtgacatgtgcccttataagaggaggagaagaaacatacacacagagaaggtggtcatgtgaagactgtagagatgcaaccacaaacaagggatacctatagtcaccacaagctgaaagaggcaaggaagaattctcctctagaattttcagagacagtgcaaccttatagacatcttgatttcagactctggcctctaaaactgtgtgagaatacatttctattgttttaaaccatgaagcttgtgggaatttattatggcagccacaggaagcatgaagatttgatgaatctgattctctctgtcttgctgaggagattgtacagcatccagaaagcagaggatgggcaggggaggcaatttgataatctttaagattgatctgatatggtctgctttggacatcagagaggcagctctggtggctctccgaaggatattggacagttattatcagtctgcttatgcttgaggagtaggtcaatgatgagttgttggtgagtcttgaagtgtagtggggatgaagctgggatatctgcattggccatgaggttccatagtcacttcccaacctgtgagttaccccagcagcctgtcaggggaaacttaatgtgctgcctttatctggctccctgaataaccagttcatgactaaagagaggagaaataattattttctgtgatttctttctgaaaaagacagaaattttgtaatcatctgaccatacagtatatgtaatactgaccttagaaatatttcaagtgctactgtgcatgtgtgtgtgtgtcccatcagtgagcccccagattccattgaggcttatttagttatttattactgcatagaaaaacaccccaaaacttagtggcttaaaacaaccacctttttcttctcttttatagttctatgaattgaccaggcttagctgtgcagcttttctgctggctttccttggggtctcccacagttgtagtcagataacaagctgggtctagagtcatctggaggttcaccttggatactaggatgccttgagctgtctccctctccatgtagtctcagtacctcgcctctcctcatagcttctccacatggtctctccagaagggcagtgtgacttcttacatggtggtttaagggtcttaatgtgagagttccaagagagagaagtgaaaactgctagtacccttaaaagtgagtccgaaattgggacagacttaactctactgcattctgttggttaaacagtcacagtaaagcagattcagggaaggagaaataacttccatttctggatgggaaaagacaaagaactggcagccatctttagtccatttcaaggctatttttgaaaagttgcacttttgccattttccttaagcagtacaaatggaaatggaggaggcacactgcagatattcagtaaatatttgatggatggattgaatgaatacatgaatgtatatatgcaaaagagttggccgtgtttcagcatttctaagggaccttaaaaagaggatttgctaatagctaagatatagtactgaacttgcccagggatattgtttaagggttagattggaaaaagaaatgcttcatgtctgattaaaagcttaatgtcggcatagaatggtgttactaattaaatcatattattaactacagagtgcatacatataccacaatgctaggcccggggaagactcattgtttgtccactcccttgccgtttaggtgggatacttattacaaagaaatattgatgatatttcatttgtttatgaattataatctagcagataaaactgttgcaggcatgaattcagaaagatgagctactcacttaaaaacttaataaaatgaaaaggttttaaagtcaatatatatatttcatctttactgaataattcttcattcgtaaatcacactgtttcctttgcctaacttttcctagtatttacttttcttcctttcctatgataggaatcctgaaagtcataagttttctaacttaaggcagtactattgctttaatattataaagtaaatactactagttattttactgacttaggcagcatacagaagtcatatcaaaattctgagggaaaataacaataactttttgggaaagtgttactaagagattagtcagctgtccaaatgggagttaggtgtgtaaaactgtgtactaggtattaaatgcccaaagcaagtactgttctactgtttgaacaaagggaagtacttatgaggaccaaagaataaaacaaacataaaaaaaaaaaaaagatttgaacttgaatgtctgttcctgggtgcctttacttgttccactctttgccatatgcttcatcctcctctgtctagaactcacattttcgcaggatttgctcctgattccattcagacgcctgctcaaattccaccccactcaccagagtggcctgtcgcgacaacccttgctaaaatagcatccccattgttctaactttcttcatggcacatacatacagttgttgctttcttgtttataatttgcctctctccactgagagcaggggcactgctttctcactgtcagccctacagtgcctggcacttagcagttgctcaataaatacctgggagtttaagaccgagtccccaaacgtcagcttaacgtaatgcacaagagatgagagctcagacactccagacctaggtacacgtatttgcaaaagagaaagataaacactgctgacttaggttccagccctagattcatctgcaccgattgtggaaaaggctgctggttccagattgacctcattattcatggatcgtaaataaacattgtttcttcctctttaaagatttctcaccattggtatttattgtttcacactaaccatgcctttgcaacactcctcaggaagacaggcttcctctcatgacacatcccccaattccaccgtccactggctgccctagttttggattataagctatgagctatcttagcagtctaaaatgattggttggaaatatccttcatttggattgtttaaagttttccagatgtgtggagtagcagtcagcaaggaaaaagccagtagaatatcaaatgtgttattttattgctgcaaaatgattttcaactcttcttacacccaaataagtgcccagaaattccaaagaatcaaaaatgtcattgtttctcaatgcttccaccatcacttctatttcaggagccaactgtactcattcccaaatggggagaataattgtatgcatttgtaggattgaaaccgagtttccaaaatatttggtgacgttattgaggctggctttgtggggttttttttagggacaatcaatatctcactagagtaaatgtagcatcaaattgcattattttagtggcagggcttctaattatgattcatttgataaatctggtgctaagtatgcaataaccttgttccctcgtttatgtttgcctctgtgctaattttctttttaaactgaactcttcagaagagaacttaaggtatagaatttttatttcagttaaatagtttcggctcattcattgtatatacccagctctcctggcccattgccagtcatacttaaatggtggttgagctaatcaagatggtttgatcatgccatgcaactagtctactgccgcataatctcagttcaaataattccaagcaagaaaagtagaattagtctactatgctgggtagatgggaagaccattgcatacttactgggtcacttcacttggtactaagacttgaagttgttaagattttatctgtttgcttgccttacttgagtctccctaactcttaaagcaggaaagtgtgcttgagttctcacataagcagttcagccagtggtagttagtgtacatagaaacaggatgttatggctggaaggaacacttgattcgcaatttccccaagcacaacaccaatatgcaggctattgagaaatggagagcatctccctggctgcttgagacagtggtttctaggctgtagccattcccagggaagtctccatggtaagggtaatttacttaagtcatgagaaacactgatcttcattataaatgtaaagagagcattttggggagcaattccagttccagtagtttgtttttgccaaatataactagggggcatttagtattttgagatgataacttgaggaaggaagcccttgtcttttgtaaaacaattacttgtttataatgagttacatacatgtgttcctttgagattataaactctttgaagttatgaacaatgtctatctctcccactgctctattcccaaggcctagaacagggtctgacacatggcagacagtcagtaaatatttatagattgaatgatgaaggaatgaatgatgtccttgaagttcatagcaattgctattcaagacaagatcgttttgttgttgttgtttaatttaatttgtttgtagcgtaagagggatcttcaccatattatgtgaacagcaaaattacgggcaagacaaattacatgcaattgatcttttcttgtgaatgttgaaggtcgaggtctttcatatacaccaatttgtcaataaactttggccttttgtgacactggatttctagcagcaactattggtgatttttttttttttttttttttttaaatttaacagctttattgaggtgtaaccagcatacaataagtttcacatatttaacgtacacaaatttgatgagttttgacacatgcaaacagccatgaaaccatcataacaattaaaataacaaacatttccatgtttgctttgttttgttgttttttttttttttaatgtgtttttttttttttttttttttttttttattatactctaagttttagggtacatgtgcacattgtgcaggttagttacatatgtatacatgtgccatgcttgtgcgctgcacccactaatgtgtcatctagcattaggtatatctcccaatgctatccctcccccctcccccgaccccaccacagtccccagagtgtgatattccccttcctgtgtccatgtgatctcattgttcaattcccacctatgagtgagaatatgcggtgtttggttttttgttcttgcgatagtttactgagaatgatggtttccaatttcatccatgtccctacaaaggatatgaactcatcattttttatggctgcatagtattccatggtgtatatgtgccacattttcttaatccagtctatcattgttggacatttgggttggttccaagtctttgctattgtgaatagtgccgcaataaacatacgtgtgcatgtgtctttatagcagcatgatttatactcatttgggtatatacccagtaatgggatggctgggtcaaatggtatttctagttctagatccctgaggaatcgccacactgacttccacaatggttgaactagtttacagtcccaccaacagtgtaaaagtgttcctatttctccgcatcctctccagcacctgttgtttcctgacttcttaatgattgccattctaaccggtgtgagatgatatctcatagtggttttgatttgcatttctctgatggccagtgatgatgagcatttcttcatgtgttttttggctgcataaatgtcttcttttgagaagtgtctgttcatgtccttcgcccactttttgatggggttgtttgtttttttcttgtaaatttgtttgagttcattgtagattctggatattagccctttgtcagatgagtaggttgcaaaaattttctcccatgttgtaggttgcctgttcactctgatggtagtttcttttgctgtgcagaagctctttagtttaattagatcccatttgtcaattttgtcttttgttgccattgcttttggtgttttggacatgaagtgcttgcccacgcctatgtcctgaatggtaatgcctaggttttcttctagggtttttatggttttaggtttaacatttaaatctttaatccatcttgaattgatttttgtataaggtgtaaggaagggatccagtttcagctttctacatatggctagccagttttcccagcaccatttattaaatagggaatcctttccccattgcttgtttttctcaggtttgtcaaagatcagatagttgtagatatgcggcattatttctgagggctctgttctgttccattgatctatatctctgtttttgtaccagtaccatgctgttttggttactgtagccttgtagtatagtttgaagtcaggtagtgtgatgcctccagctttgttcttttggcttaggattgacttggcgatgcgggctcttttttggttccatatgaactttaaagtagttttttccaattctgtgaagaaagtcattggtagcttgatggggatggcattgaatctgtaaattaccttgggcagtatggccattttcacgatattgattcttcctacccatgagcatggaatgttcttccatttatttgtctcctcttttatttccttgagcagtggtttgtagttctccttgaagaggtccttcacatcccttgtaagttggattcctaggtattttattctctttgaagcaattgtgaatgggagttcacccatgatttggctctctgtttgtctgttgttggtgtataagaatgcttgtgatttttgtacattgattttgtatcctgagactttgctgaagttgcttatcagcttaaggagattttgggctgagacgatggggttttctagataaacaatcatgtcgtctgcaaacagggacaatttgacttcctcttttcctaattgaataccctttatttccttctcctgcctgattgccctggccagaacttccaacactatgttgaataggagcggtgagagagggcatccctgtcttgtgccagttttcaaagggaatgcttccagtttttgcccattcagtatgatattggctgtgggtttgtcatagatagctcttattattttgaaatacatcccatcaatacctaatttattgagagtttttagcatgaagggttgttgaattttgtcaaaggctttttctgcatctattgagataatcatgtggtttttgtctttggctctgtttatatgctggattacatttattgatttgcgtatattgaaccagccttgcatcccagggatgaagcccacttgatcatggtggataagctttttgatgtgctgctggattcggtttgccagtattttattgaggatttttgcatcaatgttcatcaaggatattggtctaaaattctcttttttggttgtgtctctgcccggctttggtatcagaatgatgctggcctcataaaatgagttagggaggattccctctttttctattgattggaatagtttcagaaggaatggtaccagttcctccttgtacctctggtagaattcggctgtgaatccatctggtcctggactctttttggttggtaaactattgattattgccacaatttcagagcctgttattggtcgattcagagattcaacttcttcctggtttagtcttgggagagtgtatgtgtcgaggaatgtatccatttcttctagattttctagtttatttgcgtagaggtgtttgtagtattctctgatggtagtttgtatttctgtgggatcggtggtgatatcccctttatcattttttattgtgtctatttgattcttctctctttttttctttattagtcttgctagcggtctatcaattttgttgatcctttcaaaaaaccagctcctggattcattgattttttgaagggttttttgtgtctctatttccttcagttctgctctgattttagttatttcttgccttctgctagcttttgaatgtgtttgctcttgcttttctagttcttttaattgtgatgttagggtgtcaattttggatctttcctgctttctcttgtaggcatttagtgctataaatttccctctacacactgctttgaatgcgtcccagagattctggtatgtggtgtctttgttctcgttggtttcaaagaacatctttatttctgccttcatttcgttatgtacccagtagtcattcaggagcaggttgttcagtttccatgtagttgagcggctttgagtgagattcttaatcctgagttctagtttgattgcactgtggtctgagagatagtttgttataatttctgttcttttacatttgctgaggagagctttacttccaactatgtggtcaattttggaataggtgtggtgtggtgctgaaaaaaatgtatattctgttgatttggggtggagagttctgtagatgtctattaggtctgcttggtgcagagctgagttcaattcctgggtatccttgttgactttctgtctcgttgatctgtctaatgttgacagtggggtgttaaagtctcccattattaatgtgtgggagtctaagtctctttgtaggtgactgaggacttgctttatgaatctgggtgctcctgtattgggtgcataaatatttaggatagttagctcctcttgttgaattgatccctttaccattatgtaatggccttctttgtctcttttgatctttgttggtttaaagtctgttttgtcagagactaggattgcaacccctgcctttttttgttttccattggcttggtagatcttcctccatccttttattttgagcctatgtgtgtctctgcacgtgagatgggtttcctgaatacagcacactgatgggtcttgactctttatccaacttgccagtctgtgtcttttaattgcagaatttagtccatttatatttaaagttaatattgttatgtgtgaatttgatcctgtcattatgatgttagctggtgattttgctcattagttgatgcagtttcttcctagtctcgatggtctttacattttggcatgattttgcagcggctggtaccggttgttcctttccatgtttagcgcttccttcaggagctcttttagggcaggcctggtggtgacaaaatctctcaacatttgcttgtctataaagtattttatttctccttcacttatgaagcttagtttggctggatatgaaattctgggttgaaaattcttttctttaagaatgttgaatattggcccccactctcttctggcttgtagggtttctgccgagagatccgctgttagtctgatgggctttcctttgagggtaacccgacctttctctctggctgcccttaacattttttccttcatttcaactttggtgaatctgacaattatgtgtcttggagttgctcttctcgaggagtatctttgtggcgttctctgtatttcctgaatctgaacgttggcctgccttgctagattggggaagttctcctggataatatcctgcagagtgttttccaacttggttccattctccacatcactttcaggtacaccaatcagacgtagatttggtcttttcacatagtcccatatttcttggaggctttgctcatttctttttattcttttttctctaaacttcccttctcgcttcatttcattcatttcatcttccattgctgataccctttcttccagttgatcgcatcggctcctgaggcttctgcattcttcacgtagttctcgagccttggttttcagctccatcagctcctttaagcacttctctgtattggttattctagttatacattcttctaaatttttttcaaagttttcaacttctttgcctttggtttgaatgtcctcccgtagctcagagtaatttgatcgtctgaagccttcttctctcagctcgtcaaaatcattctccatccagctttgttctgttgctggtgaggaactgcgttcctttggaggaggagaggcgctctgcgttttagagtttccagtttttctgttctgttttttccccatctttgtggttttatctacttttggtctttgatgatggtgatgtacagatgggttttcggtgtagatgtcctttctggttgttagttttccttctaacagacaggaccctcagctgcaggtctgttggaataccctgccgtgtgaggtgtcagtgtgcccctgctggggggtgcctcccagttaggctgctcgggggtcaggagtcagggacccacttgaggaggcagtctgcccgttctcagatctccagctgcgtgctgggagaaccactgctctcttcaaagctgtcagacagggacacttaagtctgcagaggttactgctgtctttttgtttgtctgtgccctgcccccagaggtggagcctacagaggcaggcaggcctccttgagctgtggtgggctccacccagttcgagcttcccggctgctttgtttacctaagcaagcctgggcaatggcgggcgcccctcccccagcctcgttgccgccttgcagtttgatctcagactgctgtgctagcaatcagcgagattccgtgggcgtaggaccctccgagccaggtgtgggatatagtctcgtggtgcgccgtttcttaagccggtctgaaaagcgcaatattcgggtgggagtgacccgattttccaggtgcgtccgtcacccctttctttgactcggaaagggaactccctgaccccttgcgcttcccaggtgaggcaatgcctcgccctgcttcggctcgcgcacggtgcgcacacacactggcctgcgcccactgtctggcactccctagtgagatgaacccggtacctcagatggaaatgcagaaatcaccgtcttctgcgtcgctcacgctgggagctgtagaccggagctgttcctattcggccatcttggctcctccctccctggtgattttttttaacagtattgttgggaggtttaagaggtgattattatgagaaatcccatatgtttacctataggtcattctggtatttgcttacaattgcattctccacagcccccagcacttgataaaatacagaagcattctactcttcctctcccacagttagccgtatgccactttatatctgtaggtgctttgtacacatcactccctcttggagaggaaaaacagctccaatatacagtggcttattctaaaatgtgtttaagaaatacttcagcctcaagtacttaaaagcttaaagagagcagtaccttagttggaataaatccagtgttcaaagtttgaagaaatccggtcggcttcaagcaagcgtctagatttatcccatagtttaaaagacttaggcaagggagactaaaggcatggaagttatttttagcaccactgaaattgtggagggacaattttactgctctgcaagttgagaaggtttttctgctgtgcttaaaacatgaggtctccttcctcccaaggcaacactagcttctaagccagtgtttgtgaggctaataggagtcttgtcagttgtcactcgtcagttgtgaccagaggcttctggaaagaacgtgcagtggagataagaagaaaacacactttccagatgcatatgaatgttaaagctttaaagatagacaaaggttaaagaaattagcttctggttttgatgtaatgaaatagcaaggtcaaagcctatactgttctttctcagtataaacttacgtatttaaaaagagtcatattttagcataattgtgtgctagattttacatttttatggtaaatttgtttcaacctcttaccctgggggaatttcataggcaattatgttgattgtttttctttccttttttttttttttttttttgagagacaggggtctcactatgttgtatgttgcccaggctagtctcgaactcctgtgctcaagtgatcctcctgcctcagcctcctgagtagctgggattataggtgtgcaccactgtgcccagctatgttgattgtttttctaattgcaaggtgcagtttaaaatttatcattacttaaagtgtaatgacttaaataaaagttaaggcagagaggaagcacaaggagaactctagttgtagtaaaattaagggtgacgtagtaacctcctgcctcatgaaatctaatggaaatgagaaagtggaagtttccccaaacacagtaacatttgttatccatttaggatcagatttttgcctgacaaaggggtgttaaggatttgattgtcttccacaatgttggtctcttatttttagaatatgtaaaaggaaagcacaagatcaattttttattgtgataaaatatacataaaattcaattttaaccattttaaagtatacagtcccagggccttttagtgcaatgttgtgcgactgtcagcactagctagttcaataacattttcatcacttcaaaaggaaatcttgtatctattaagttgtcactccccattcccctctcctcctaacccctggcaaccaagtaccagacttaggcaactggtaaaagctactttctgtcttttgtatctgcctatcctggatatttcatataaattggatctattttttaaaaggagaaaatcaaagctagccatagttatcatttggtaagtggcataaaagcaaatagtcggatttcacaatcagtagacctttccttctgcaagctagccataccataagtgaaggacaaacaggcacatcttgattattgaacagaaatgagcgttggaatacctaggtactatagatgagagcctagaatttcaggtgaattcctgtgtcccagaaattttaaaaatcatttcatcgataattttctgcctgcctttttctttttactctttctggagtaaagacagaaaatttttattacattctgattttggatcactgggctgctgatcctttgtcatttcttccccctctacttttagggcatttactccatactatttatttttatttactttttttttaattgtaaataaaagaaatttatttcttacagttctggaggctagtaagtttaatagtatggcacaggcatctggtgtaggccttcaagctgcattatcccatggcggaagagcagaagggcaagggagtgtgtatgaaagagaaagcatgaggggctgggcttgcttttataacaacccactctctggataactgacccactcccaagataactacattattccattcatgaagggtccaccatcaggacctaatcatctcttattaggtctcactacccaacaatgttgcattgtggattatttccaacaagtgaattttgggagacaatgctatttatttttaattcctataaactcttaaaaaatctctggatgttcattttctacaggatctgggaaactggaaatctaattgcttcttaaacctactttcaggttttttcccttttttataactccatcttctccccaactccctgaggtacttaatgctgccagttcctgaggcttttaagtcatctatagcagggatcagcaaacttcttttctaaagggtgaggtagtaaatattttagactttgtaagacatacaactgctcaactatcaaatacaactgctcacaactgctcaactctgccattggattagggaagcagccatagatgatacggaaatgaatgggcatgtccttgttccagtaaaactttctttactgaccgctggtttatgatccatctcctttccaacttccaagcttttgttgctgtcatttgtccccactccaattcttgttattttgagactgtatatttttaatgcttttatagtcatcttactggagttttaggagtgaaagtaaaatattttgcttcttcatcatctttacctggataccacaggtgagcatgaataaggggtagtgtgaagtatgaaagtctggtatttccattactttttttctgtaattggacccagataccacaggctttttacacccactaatttgcatcttttaatcttcattttcctttcttgtaacacagattttactgtcatttcagcctttatctagaaatctatttccagcaataggtaggatcttagcatttgtgatttcatgtaaaattaatagaacctagattatgggcagtgcagtcagcgtaggagactaacttgcaaagggcaggtgagaaaaacagccctttcaaagaagggctaggatcagcagaacatgctgataatcgggaggctgcagcttctctgactgcccaccaggggtagaactgaggccactgagagcagttgctagtcctcgcaccccgagacctcgagcaatggtggcaaataggacaggaagccattctctgagtcagcagctcccaaatataagccaggagtagcagcacatatgttcccaaactgtgattatgctccacaatcccctcccttcctctcccagagcaaatcacagccattctcagtgtgctactgctgaggaaagagaactggaaaataaatcctctgtgttttccaatgaaaatactgttcaatgtttaaataaatgttatagaagcaacagctttcagacatgactgcacgttgtgatcacctggggaattttgaacactcctaaagcccaggccccaccctagactattgatgtcagactctctgagggtggggccaaggcattagcattttaatgctaccttgaggattccagtgaacaaccaggttgaaacctcattttcttgcccctccaaccccccatggattttcttatcagctcatttcctcagcaaaggtaaattgacactagggcatgacacagagcaagagtgttctgacttgggacgggaaatttaggaaactgtagagtataattatggttttagaacataagattttttaaatataagactatgagagttatgtcatatttaataaaagctcaaatttaggcactattttaagcactttccatatatcatctcatttaatcttcataacaaacctgtgatggattattatcattttcatattattaccaaaagagatcctaaagcacaaggaggttaatttacttgtagtagtccattttgtgttgctataaaagaatacccaaagctgggtaatttataaagaaaagaggtttatttggctcacagttttgcaggttatacaagcatggcaccaacatctgttcagcttctagtgaggcctcaagaagtttttactcatggtggaagggtgaaggaggagcaggcatgtcacatggagagagagaggagtaggtgccaggctccttttaacaaccagctctcaagtgaactaatagagagggaactcactcattaccaagaggatggcattaagacattcatgaaagacccacccccatgacccaaatgcctcccactaggtccattttcaacactggggatcacacttcaacgtgagatttggaggagacaaatatccaaaccatatcacttgtccaaggttacacacaagaagtaagtggcagacttcggggtccatccctagcatttaagatcatggctacactgcctctacatctaattttgcaaatagatgattccttcatagaaaagaatcaaattataataaatgtaaaactgagtaaaaataaaaatctgtgggtacagcacatgtccacaatcttttatctcaattctgaaatctcccaaagctttaaaaagttttggaaatttggacccaaaactcatttgcctttaagacctgaatctaacccatgtgaggtcatgtctaatccttttttttgcccatcatagtataaatattcacattttttgtggcacagttattacattttactattctttgctccggcagactcacctagggctgttaggtaatatatggctatggaaatccaaagtgctgtgtgccaaatgtttctagccctccgtcctctagacacattgtagggttgcactttccttcccttttaaagttaggtatgatcgtgtgacttgatttggccaatgaaatgtgaactgatgtaatatatgtcatttccaagcagcagttttaagagacggtttgcacttagttgtaactctctttccagagttgctggaactctgaccagcaacacccctgatggtgcttgctctgtgtgatggttaattttatgtgtcaacttgactgggctaagggctgcctaggtagctggtgaaacattatttctaggtgtgtctgtgaaggtgtttccaaaggagattagcatttgcattggtagactgagtaaagaagatcaccctccctggtatgggcaggcatcatacaacccactgaaggcccaattagagcaaaaaggtgaaggaagggtgaattttctctgcttgatctgaggcatttatctcctcctgccctcagccatcagtgcttttagttctttggctttcagactatgactggaatttataccattagccccctgattctcaggcatttagactcagactgaattacgccactggtttttctgtttctctagtttgcaaatggcggactgtgagacttctcagttttcataaccaggtgagccaattcccataataaatcttctcttacatatacctaaacatatcccattggttctgtttttctagagaatcctgactaatacactcttacagcctgggaccttgaagagatatagagcagagtcccccacccctgccacaagttggatttgggggatttttgttactgaagcctaatgtagtctagcctgacagatacaagagtataccaccttacatttctaaaatctgaaagatcctgagttctgaaacataaatcacttagggtttcagataagagattatggatctttacttgaatatttgaatcaggatatgttcccctaagaaaaattgaactgtgtcattactgtgagtacagctatttcctgaaaagagttaactagcctctgagcaacatcatctggattgagctcttggaagtcagggactgtctcatgtatcttggcagcctcaatgcttgatataaagcgaacacttagtaaataggtgctaaacaaaatgggtggcataaagacagttcctgaaatgtgagtcttcagggcaaaaagcaaagaaagagaacataagaggtgaaggcaaaagttatctattccagctacttcacaatttgccttgtttaaataatgaactggagtcagggcaaaccctgtttgaaaggacagtatagtggctgtaaataaatgcttatggagtggagatgaggactaactggggtcatttgaacacgtaaggctcttagcatggaattcatttatacttaacctgcaataattttagctattatcaatattaactttaaaattgtagcaatcctcggccaggtgcagtggctcacgcctgtaatcccagcactttgggaggctgaggcaggaggatcacctgaggttgggagttcgagaccagcagaccaacatggagaaaccccgtctctatttaaaaaaaatacaaaaattagccgggcatggtggtgcatgcctgtaatcccagctactcgggaagctgaggcaggagaattgcttgaacctgggaggtggaggttgcagtgagccaagatcatgccattgcactccagcctgggcaacaagagtgaaactccatcacaaaaaaaaaaaaaaaaaaaagtagcaatccttgtgaaactctatataagagaaggcaattgcctaacactaacattttcaaactgggctttactgtgttctttggtgttgtggactgaatgtttgtgtgcctccctcccctaattcagacgttgaaaccctaatccccaatgtgatgctattaagaggtgaggtgtttgggagttaattaggttatgagggtggagtcctcatgaatgggattagtgcccttatatgaggggccctagggagatcttttgctctctttttgctatttaagaatgcaacccagaagcaagccctcaccagagtccaaacttgttggcaccctgatcttggaatttcagcctccagaactgtgaaaaaatacatttctgttgcttgtaagtcacctagtctatgatgcattgttacagcagcccaagataactgagacatagggactctgaagcacctttttagttcccctaggctggggaatgtcagagctcttggaaaggggaaggggaagggcctgacctagcaatgcctgcttcaaccttaaccactctgccttactgccatcacatattagcatctgattaggattttctttgaaaaaaaggtcctgtggataaaaggaatcttgaaagccatttgaaaaatatattttagaaagatcttcagcagcaattgttgaaaaccaaggctttttgatacattttattttaaaataaaataaattagtaactgactcataaatcctggtattctggccaattaagattttaatgtagcatcttgagataacatttgaaaaaaatatgcaatgctctggcagtcatgagcatatatatccttacattttccctgcctcctcaaaaaccaaaagatagatatttgtaggttaatcacatgagggctttgcttagctagaatttaatgagatgttccttaaagctcctagaatcttcttcttggctcatgaattagtggctctgaagggcacaggttattagtgtgttctgacttaaggcaaaattagagacttggagaagaggctgttacatggattccattttcatggtcctattaatgtggcgaatgtaatgccactgagtaacattggctcagtgtggatttaggactgtgtggtgtctggtgcatgtatacaagatggccgttcccttatgaactgactggttcatgtagtctcacacaagaaggtgcttttcttactcacctttcctccccactggggcttcaaggattcctattttgagagtcttgtggggaaaacaaaaaagaaacttgaaacttcctgagcatgtgtctgtccagaagtaaaagagggaggaggactgcttagaacagctaatcttaagttggagacattcagaaggtggcaagtttccaaagacaagtctgattgtttcaaaattttggcaagagtgaaccctgcaaaagtgtgtatatgtgtgtgtgtatgtgtatacgcatgtgttggtaaggggaggtagaagtgggaagtggaatgtttttcctttttttcttttctcctatctggaatgtctctgattcccaggattttcaagtgagaccaagctggttgcttcaataggtggtgatcacactgacccagaagcctgagtagggcaagtgggctgtggcttggcagaatctggggctcctctacttgccagtgagttgcccgatggttgagacaatgtcaaattcaacttttagactcccagaaggtgctcagttgtttttggtttttttagattatataactattttgcaattaataaaattgtatatgttaaaggtgttcaacatgctgccttgatatacatatacatagtgaaataattactaatggtcaaccaaattaacatgtaatatggtttggttctgtttctccacccaaatctcaccctgaattgtaatccccataatccccacgtgtcaagggtaagaccaggtggaggtagttggatcatggggatgttttttcccatgctgttctcatgatagtgagtgagttctcaagaaatctgatggttttataactgtctggcattttccctgattgcactcactctgtcctgccaccctgtgaagaaggtgcctgcttctcctttgccttctgtcatgattgtaagtttcctgaggcctccccagcaatgtggaactgtgagtcaattaaacctttttcctttataaattacccagtcttgggtatttcttcatagcactgtaagaacagactattacacaagtacattacctcacttagttaacttttttgtttgtttgtttgtttggtgagagcacctgaaatgtactctcttagaaaatttccagtatacaacacagtattattaattagattcctcatgttggaccttagatctccagacttattcattctacgtaactgaaactttgtactctttgaccagcatctctgcatttctcccttgtaactattaaagcctcctttatttctttttaaaaattgagatatcatttacatgccataaattcacccttttaaaacatacatgcagccaacaagcatatttaaaaagctcaacatcactgatcattagagaagtgcaaatcaaaagcacaatgagataccatctcacaccagtcagaatggttattattaaaaagtcaaggctgggcgcagtggctcacatctgtaatcccagccctttgggaggccgaggcatgtggattacctgaagttaggagttctcgaccagcctggccaacatggtgaaaccctgtctttactaaaaatacaaaaaattagccagatgtggtggcacacacctataatcccagctactcaggagactgaggcaggagaattgcttgaacctgggaggcggaggttgcagtgagcctagattgcgtcattacactccagccttggcaacaagagtgaaactccatctcaaaaaaaaaaaaaaaaaaaaaggaaaaaaacaacagatgctggcaacatttcagagaaaagaaaatgcttatacactattggtgggaatgtaaattaattcagccatggtggaaaacagtgtggtgattccttgaaaacctaaaaacagaaataccattcgacccagcaatcccattactggttacataccccccaaaaatatgtcattccaccataaagacacatgcacatgtatgttcgtcacagcactattcacaatagcaaagacatggaatcaacctaagagcctgtcaatgatagactggataaagaaaatgtggtatctgcataccatggaatactatgcagccataaaaaagaatgagattatgtcctttgcaggaacatggatgaagccagaggccattatccttagcaaactaacgtgggaacagaaaaccaaatatcacatattctcacttataagtggaagctaaatgatgagaacacatggacacatagaggggaacaacagacgctggggcctacctgagggtgagcagtgggaggagggagaggagcaggaaaaataactaatagatactaggcttaatacctgggtgatgaaataatctgtacaacaaacccccatgacacaagtttacctatgtaacaaacctgcacatgtacccatgaacttaaattaaaagttagaaaagcacagtggctcacacctgtaattccagcactttgggaagctgaggctggtagattgcttgagcccaggagttcaagaccagcctgggcaacaagacaaaatcccgtctctaacaacaacaacaaaaaattagcctggtgtggtggcacacacctgtggttccaactactcaggaggctgaggtgggaggatcacttaagcctgggaggtcaaggctgcagtgagtcataatggcgccactgtactccagcctaggtgacagagcgagaccctgtttcaaaaataaataaatacatacgtacatgcatacatactttaaaaaattcacccctttcaagtaagagcccaattcagtggtgtttagtgtgttcacaaggtcaggccttaggcactatgcctcctgcatattataaatgaatcagcccttctttcatgaatataatagccagtggtcactgatatgggtggattagggccctgggagctttatctccctaaggagacctttagaggaataacaagaagcaggctccttcccaggcaggctaagtttggtgcttttatttcttgaagccgcaaaatcaacattccttgggagagcagagtaggagcgttagatcacagctggagctgtatgaggaaagtcatgtttatcagaggaacctcctccttaagtttgtctcagatgctgcagtttgcatcccaggggagaaaaactaattctgctttccccagagcccaattgtaatctgcgaaaggcagtgggacctggcagccatccagcccatgcctcccttttccagatgtgaaagcttgaggctgaagcagttaactcagttttttgccctgattttttgcatttcctcctatcttaaagactctaagagggagaaagctaacccaagggatatatttgcagtcatcacccacccacattcgatagcatcttaccctgggaactcccctcttcactaacaccttccttggcaatggctgccttgggcagtgtggtttgggacttttgggccaaggatggctggataatgaatagaacagtgccagtcaaggtggagaccatcagcaacatcagcgtcaccttaagcttgttagaaatgcaacatttcaggcacccccaaaatcaggaacactgagggtgatgcccagcaaactgtgttttagtaagtcctccaggagatctatttgcacgttaaaattggaaatgcactgagaagactcttgatcaggtagggctcggggtgctaaacctaatgacatggctgtgaaagctagtgcaaaatcaatacaaaaaaataagtagaccaactcaaacctctgaagcttatctacacatggccataaatactcacacattgtatcatttcatgtaggctaaaaatgaatttgacttaccctctcctacctacacctgttggtttctcatttggtaatatccttcttccttcaagcagctctatattgtcaatgtcattgcaaatagattaaattaagaaaagaaaaaatagtggaaatggagtgaaaagaagggaaacttttttttaaccctgctgtatcctgtgcctgttgacctagcattaaaactctaatttaaagataagtctcattaaagatgtcccttttcaggagtggcattttctgacaatggaatttaggagtctaagattcctaaccatggtactatttaaaacttttgcctagatttccattatcaaataaaaagcaaatccaggtttagctaaggagaaacattattcaaaaggactatttcgatgaggggtgggggattgttgcatatggggagagaactttgcaataggacgaatggtcccaccagaagatctgcaagcaccgcaaaggtcagatagaaaggaattttcttttataagaaggaataaacaaggctagaaagaaccagacatggggagagcgatgagcaggaaatgcctttccttgagagtcagccagttctcttaaggggccattcaagggggattggttgttcagcatattgatgctattggcaggcattttatccagattagtcaggggtttacaaacagttcagttaatcatttgtggcaatgaatggaaatttgtagtgtctgtgtctggcctgtcctaggtaaacaaaggggttattcacaagtcttcttaaagtcatatggttaagaagagtggttctgtgtagtaagcccttcctctggacaccaaaggatggaggaatttcttaacctgtgttgtcttccaggcagtgtatatcattgtcagtatatatcactgaaacatttaaaaataaaaacctcttagcatttatctaataacacaattatctttaattacaaaacacatttgttgacttcagtttggccaacctatgtgttttgtaattaaatggaatttgctttattagataaattgctaaatgcctcttttaggagaggaagtagtaaccaaacttagcattaaatacatgcaaatacataacagagatttaaaaaaatactttgaggatagaattggatgaactatttaaagctggatgcaagagttggaactgaaagagatactacatattttttccacgtcagtaaatctggtacgtacaatatgtcatgctggtgaacaaagaagtgctgaggagtcatgaattacacagtaatgagagaataatgtggctaagagggtgttcacaggttgtccggttagcaccacttaaaaataatcatcatggttgaagtgtttttttcatgtggaaagcttaattaaagcaaagcaactaagagcagggggatctttaggtaggaagtaaggagggaaaaaggttaatttttcaaataccacatttttttagtgctgtggtacactgtgaccattagctgcctacagcctctataaaataatggaaatcctttctaatatcatcttggggtcttgacagaatgttctacagttttacactattgttctctatcattatatctgtcaatatagtttctaccatcataaattgatggtagaaactgcaaattccttatgggagatttgttcctgaccttgttggtgtccttgggggctttttagcagaataggaaagtcttattatcagggatgagtctaaaaccccttcaaaaaaaaaccagtgacaacaataacaagaataggtgtcttagtccattcaggctgctataataaaatatcataaactgggtaacttataaacaacatttatttctcacagtactggagactgaaaagtccatgttcaggcagatttgatgtctggtgagggcccacttcttatagacggtgcattctcactgtgtcctccacatgacaggagcaaaggggcttctttgcatctgtttgataaaggcccaatcatgaaggctaatcccattcacgagggctgcactctcatgacctaaccacctcccaaaatcctcacctcctaatatcatcaccttaggagttaggatttcaacatatgaatttggttggtgggtgggtgcgtggggggacacaaacattcaggccatagcaataggaagacattaagaatcagccaggcttgctgggcacagtggtacatgcttgtagccctagctaatggggaggctgagatgggaggatcatttgagcccaggagttagagtccagcttgggcaacacagtgagaccccatctcaaaaaagttaaataaataaataaatgtatgtatgtatgtatgtatgtttgggaggccgaggtgggcggatcacgaggtcaggagatcgagaccacggtgaaaccccgtctctactaaaaaaatacaaaaaaattagctgggcgtggtggcaggcacctgtagtcccagctactcgggaggctgaggcaggagaatggcgtgaacccaggaggcagagcttgcagtgagccgagattgcaccactgcactctagcctgggcgacagagcaagactccgtctcaaaaagaaaaaaaaaaaaaaaaggaaaaagaatcagccagacataggcagtttatcaactttattttgtttaaaccttgcaaccagctaagtgggtatcatttcactcctactaagtgggcatcatttcactccacagatgacaaaattaaatttccaaaaggttagactcaagtcttttcactacacttcaggaagtttctaacatgcatggcagaaaaaggtatccctctttgagcccagatttctgaaggaccagtaaggggtcatgaaggaggcagaagtagggctggtctttccagcttctctcatctgtgaaccataatgactgcattttaggctcatctttgccaagttgtcaaatcagttttgacacaagcagacagtcaaaacaagttttggaagatgaactttggaattcttattgtctgccatatgcttgatcgctgctgtatccgccaaaatagagccatcctcaagccgacccagctcttcacatagctagaactaggcgctctgttctccccattcttcttattagtgctccattttccctactgaaactggaggcaaccctgattctgtactcttatttcttgctttccaaaggatggtattataataaattcaattaaagatgtatgtgaggtttggaggggaggggggagatttctttagagaacattttctattctaatgtaagaaagccagacctagaagacattgaatgtaatagcaggagctcactttattgtaagtatggagttaggttaatccttagtagattcgggatcctatagtcccatgataaatgtatgcactttttaaattagcctctagtgtaacctaacacttcattgcttgtggaaattcccctcttatcaatatgttttcttagcatagcaaactctttgaaacattcttctgtaccagttgtaaatagcatcttttttttcttcatctttggcctttcagaaaataaacttagaatgttttaagagtattaaaatactttttccacattaaagttagagagaactgaggtagaattgcactgagggtgggaggctgactactaacatatgttccaggatctggtccgcaggtttgtagtttcagaaattagaattgtgtggtgctcagagtcaatcagccttaaccatacgtagcctaactatactcacaagaggctggcttacaatcacagtaacacttgtttacactgagaaatccaattttcaagaagactagaatacttattttatctgtgtagcacattttctcccttacaggaaagctgtaggttttagcgagtcatgggaaataggacaagaaagctcactggttggtgtcatccaccttgaagattaacaacttcctaggcagaacttgttaaaagataacttttaacaaaaggtaaaatcatgactctcatacatacaaatataaaatgaacacgtaaaatattttatgtgactcaatcaaatgagggagccaacaaaatgtcacaaccattttaaagtagaagtaatgagaaccaagtgctgtggctcacacctgtaatcccagtattttaggaggctgaggcaggaggatcacttgagcccaagagtttgagaccagtctggtaacatagccagatcctgtctctacaaaaaaaatttaaaaaatagaattagccaggtgtggtggcatatgcctatagtcccagctactcaagaggctcagccaggaggatccttagagccctggagtttgaggctgcagtgagtgagaccctgtctcaaaataaaataaaataaaataaaataaaagtagaattaatgaaccactgatttatatggagtaaaacatattgaaactaacttataagtggacacaaacctggctatttcccaagggctatgattgaaggagtcaattgaactgctgccagacagattttatttgcatgcttatattttatttgagctattttacaactctactatttgtaaaatagctcaaagaaaataaaaagctagaatcggataactcagaaaattgtgctgtacacaatgcatagttttccctttggagatagtaatctttttccctaattccaaattttcctacaaactgacatcttcttttgactgaaagtagttattttgaaggtcaattgtagaactgatttctcctggccttgggataattttcttctctcctttttctttcactggcttacaactaagtttccttaacagtataccctaaggaagtatcttttattatttaaaagaacccccaattggtcttttgttcagttacaattttttgagcacttaatacattgattttcaaacctggttgatcagaatcaggtagatttttagaaatacaggctaccagacccatctctggattttctgatccagactctcaaggacatatgtctttaacactagtgatttgaggagtctgtggatatactctggataagagacctagttgacaaattgaatattctagcaggtgttaggggtggaggttttcatgagttgcagatgacttctggtcattgagtgtgtccaaagacaaaattacaacaaatttagtttaaagatcttaatggacttttatttgtgattctagaatcagttctgatgagctgatcagaggaggttggctttatagacagaaaaaagttgaggaaagcaaaaacagaacaaaaaacagacaggtcacttccaagttactttctttatagaggttaaagcagaggacaagtccttatcaggctggctaaaaactggcctgtttggggatttggctattatctctctcctgatttcatggaaggtcagataaacaacttagtttcacattacagacatggaacttcagcatgaataactccattttgatttggtctgttgagccaattacagaagctcagtccaaaccaatgaccacctctaaattttatttaacaagtgacttgttggatggtgatagaacccattatcttctttataatatttagatccctaagatactcatatcacactaatatactttaatatagcttttccctccaccgcaaatttggaactaattctcatgttagaatcactttagaaagatgcattttgtgatagtatatgaacaatacaatagagagggtcacattttattttctacaaaaagccaacataggatgtgtttggtagttatgtttggactccactgagttttattaaatcatgatgccaaaaaaaaccctaccaaaaccaaaaatcacagtgagggtgtatcctgaaatcttaaaagaaagtccaaactatttattattgcaggttgtattttttaaagttatttccataagtgaagcaggcacatcttgttcccaccacaggtgctttctggaaaagatgtcaactgaagaatgacaagattcataaatttggaagggagagctttatttcttataaagggttgcagcctgcagggtggccattctggcagactgggaagtgtagcctctggccagaagctagaaacagacacttcaaggcagtgggtaaagagaacaggaatttatgctgagcaaggtggccaaatatacatattcaggaggagccatagttatttatgaaaagagaaacgtgtatgtcatgtgcaatggagtgtcacgtcccttcaggggtcccatgtacaaagaatggcagcattagcaccatccaagggtggagtttttggccatttgacatcaaaaggtgaagcagaggacatgaaactcctcactgcatgtcctcaatagattggccagaaccattccataatgggaggcccttatcaggaaggaatgctggtgggttgttgtgatgaaactgcagaaggacagcagtcaggtggttggttgatatggttgatatcagtggtggagtcttttgaaagggctggtttctgtttaacccttagggaaggaagcctaatggtagttagtgaagggtggttataactagccatgtctgacctcccaacctgtcagcttctcaggtttctctggggtccacttggccaagagggagtccattcaatcagtttgaggacttagaattttatttttatttcttacgatataaatgcccttagttgacatatgctccatctcctgtttctttcatggtggggaaaaactacctcagcaaacagtgatcagtgatgctaaaaacagctctgttggtggctcaagtgtttcaaatgatggggcatcacaagatggatccaagaaaccctaatctgtcagtgttaagaaggaacagcatacacagcaagcagcagatgtgttagcctttccagcagctggggtgtgtatcccagaacaagcccagcatatcacagcacaaattattacaatgttggggaataattgtcaatacgaaactactttcttgtggagcggttaggatttcctatgcttcccctccctgctcctccctccagatttcctttccagcttgtgtgtatgtgtgttgccaagaaccatttggattttaaaggctgaaaaataagtcaaattctttctcacctggggttgattggttgccagctccttcctccttcgggtgtcatcatgttcgctctgtcattgggaaggccatgcattgctgccaaagaggacctgagaagcagcttgaaattcagatgcatcagagatacatatcaggggctgatatgttgaaatcattgtcagttatctcagtttcctgatgcaattttttaaagattcttttggctcaaagtgtggttaagaattttgacttccacatggatatttgaagatttaaatatcctgtaatacaaagatatatgtgccatatctccttatggatttattttgtctttattctctattttaattcctgcagtttataaaattctgccttgtgtgcaccatccactctgtacctgatgcatatcttgatcataacatttgtcagtatattgaattcaaccgtatgtatatatctgctacctccatggaagcaacctggttctattcatttttatatcctcacaacctggcacaatgttctatacatatttgagttaaattgaatttatttcatattgacttaagggataagtccaaacttcttagcttggcaatcaaaaccctatttaacttcttactttatttttctttgattatctgcgtataaccagtattggaaacaagaaggacctaggggatggaatcataaagcaattttagttttgctgtcttcgttctttaaatctgttctgtggaggtgtttttttctcttgcccttggaattttctaactgttctttgatcgtacaaatttctatagtcacttcaggttgcacagtactagattaattcagtaattaaaatgtttggtgccatactatgaaaccctgaagctgggcctactggaagcaggatatctacagccagagaatggtacatgattggcttttactctctctcctcttctggagcttctcctcctctctcagattgctaaccgtggtttctgattcctttagagtgaaaagaaagaagaggaaaggaggcaagaaaattcttacttgattgtactgccagagtgctctagccttggtgtcctcacttggcagggatggaaagttgattcttcatatcatgggaattttcatctgctcttgtcagtcccaaggaatctagaaatatctccagcttttctttgctaagatctgtttgccccttttagtagtcctcttgggttggattaaagcaatgccatatcagctcaccctcatacagagctgacacctggtccctgggaaacacttctgcattattctttgtgacagacactgagagttcagatccatctcaataagccccttcactatgcggtaccttcaaagaaattagccagctcaactgtcacctttcagattttgagtgtgagtcaaacaccaacatctcaataagccccttcactatgcggtaccttcaaagaaattagccagctcaacagtcacctttcagattttgagtgtgagtcaaacacccaaactgtagaggattagagtactccttttcatgatctatttcccaggccttcttccacattccacaccaaaaatttgaacagagctttaatgttaaaaagaaaaaaaaaacttaaagaatttttagttaaataaaaagttattaaccactgaaaagataaaaagagaattctaggaagtagcagaggtagccattgctaaaagctactacaacctctaaggccgaaggacaaaagggaagacgttggaattattgaagcttagaaactaaaggaagacctctcataaagctgctgtcctagtccattcctactgctataacaaaatactttagattgcagatttgccttgatcttgggcttccctgcttctagagctgtgagaagtaaatttctgttatttataagttacccagtctaaagtatttggtgtctggtgggggcttgctctgtgcttatagatggtgcttcttgccacatcctcacatggtagaaggggcaaatgttgtatcttcacagagcaggaagagcagaagggaaaaggggcactaggatgctcccttcaatgtcttttatgaaagcactaatcccattcatgagggtagagtgctcatgacttgatcattttccaaaagttcccaccttttaacactatcacattgggtattaggttccaacatatgaattttagagaaacgcatgcattcaaaccaatagcagctgatgtctctgggaccaacacctttgaggaggggcactgctcagccacaggaacaaactcctgctgctgcagtgatgaagcattactgaggtagcatgcacagcaactgcatgctgacaccctgccttcagaaaagcaaaactggaaggagtaagttctgttgtcttcctcctgactttgtttccctctagtgcctcctattgaaagaggctatcagggaacagctggcaaagcagacatgtaggacacagagtcccagccccagcaccacagagcagaatctggaagggttggtttttagctaaataacaataacttacctggcatagctccttttggggtggggttggattctcagcacaatctcttctattttaaatgtgatctattttcttttgttaccctgttatacacataaaatacatccagctgacttggtttcattttctccctcctactaacccctcatcaccactactaataataagaatttgtactattgctctttcttgcaatacctttcttattttcattgatcaaatttctttcaatatgtatactagggtgggcaagtgaaataacacaaaggaaagaaatgttaaatcaggctcacatgaatcagagatcttaataacttcaaaaatacaaataattgtgaagcacaggtgatacatggagagggctggagccactcactcatgtcctcatgcatattcttgtgtagggtgtactttgtttcagatttaacatatgaggctccaaccgatgtctgctgctacagtagttacacagtggggaaatgttttggacataaaacatttttatcttatatggcatagacgacatttccatgtcctataaattagtagatttcagtcctgtttgccataagcaatcctaaacagaccaggcacatcctgctaaaataatctacagataaggaatctcccaccagcctttagtttgtttgccaagaggtctgtcattagcatgttttcaaataaatttattcatctaatctttttgagaaagacaatgattgctggtctactggccaactatttcctacccagcaagtgagatgaaactgacaagaactaatgcttgaatatattaattgaagacgagtagaacagaaagctgagggcagagatgcatgggcaagccagtttgtgctggatgtgacagatattttctttacaaaagtggggaaaggctaggttaaaattggcaagcctaaggcaaagggcaagagcaattctggggaatcacaacaggagtaagttgacagattataagggaaatttgggggtaggggattgataggaggcagaatgcaggtcaaactcagggactcacagactatataggtgaaaaaattccctagggataatgtagtccaaccatttgtttttaaagatgaacaaactcttcattgatttgctcctgagttgctctaagttggttagatgtgccacaaaaggtttcctagcacatgtttctcaaactcagctgcctacacatagaggtggggacaagcttttcagaaatgcaaaatgctggactcccacttcagaactacttgaatcagaatctgagtctgggattgggattcagtgctttttttgttgttgttgttgttgttgtttgagacagagtctcactctgtcgcccaggtaggagtgtggtggcgcaatctcggctcactgcaagttccgcctcctgggttcacgccaatctcctgcctcagcctcccgagtagctgggactacacgtgcccgccaccacacctggctaatttttttgtatttttagtagagacagggtttcaccgtgttagccaggatggtctcgatctcctgacctcggcctcccaaagtgctgggattacatgcgtgagccaccatacccggccgggattcagtgtttttaagacactccactataatgttctactaatgttcttcatggctttgacaccagttacctgcactacagatcaaatatagtaggacttcccacagtgtcctgtctgggaactgccaacagtcttacaaatctctagacccttaaggagaattgagacactgtctcagagtactaatatgaaatgtatggtctgtatcattgggtactagacaattattactgtagatttttatttatctatttaagattatgtcctgtgtcagttgtctattactgctaggacaaattaccacaaatttggtggtttaaacaacacaaatttactatcttacagttctgaaggtcagaagtctgaaatgattctcactagactgaaactgagatgtcagcatggcatcatctctttctgggggctctagaagagaatctatttccttgccctttccagcttttagtgggcaacccacattccttggcttgggcatccttcctccatcttcaaagccagtgatagcgggctttctcacactaccatttctctgattcttttttgcctccctcttctagttttatggattgttgtgattacattaggctcacttggataacccaggctaatgtccctattgtaaggtcacctgattagcgaatttgatccatctgctatcttaattctcctttgcaatgtaacgtaacatattcacaggttctcaggaattagagcatagacatcttggtagatgggggaggcattattctgcctaccacatgccctattttccaaattaggcttccaagaggacaggtctacatgttattcttttaattagaagggtgtttgctgaagcaatcattcaataattaaggttgaatttgggctaaatgctgaatgaaagtatcttcatttcctagttttattcccctagaaaggattccttcatgtgacttagtttgcattccagaataattttattaagtggattttaatagaaatatgacacatccatttactataacttatatcagagtctaaaaacatgatttctgcctatttagatcaatttacatccttccaaagctgttagttctccaggaacatgttcttctcattgtctgattctgtaaatatttcactgccccaagagtccctggaatttctggcagaatgagagttcagcaaaatcatcttcctgtttaatcattgttgttgagaatagaaatcaccattcttttgtcaataggacatggttcctgtctgttgctttccactctctcagcatcttaaatttaaaaaaaatcaaaatcaaacaatgcctgaatgcaaaagaaagcggtattagctatttccaccccagtatggagtttgaatagtgtcttgatttggttgtcatttagaagcaacgactttatgttccacagtctcgtgaggcaagaagttctttcctacaaaggggaaataatagtattcctacatttatcacaatagaataacgcttcctgaactcctattttaatatttagtgactcaatcagggagtatttgttaagcactatacttgataaaagacatctaagacataaaagtcacctaaaagaggcttaaaatagagtgaaaatatacaccaagttggagggaaagagcttctgtacaaaggctagaattaattgaaacttttctatgccatggaaacatatttgcatcaaataatatgctatggtctggatgtttgtgccccccacattcatatgttgaaccctaatccctattgtggttatattaagggatggggcttttggggaggtgattaggtcatgagggctccaccctcatgaatgggattagtgcccttgtaaaagagaaataaaggagcttgtttgccccttcttccatgtgagaatgcagcaagaagatgccatctttggagcagggagtgagctcccaccaaacacttaatctgttggtgacttgatcttggactttctagctgccaaaactgtaagcaataaatttctattgattctgaatgacccagtctaaagtattttattatagcagcccagatttatcatcatcatcatcatcatcatcatcatagcctcaagtctcaatttgccaaggcaatgggttgaaaagataacatggttgtgtaaaaaatcattgatcccaaaatgtggttttatccaaggattttaatttcctccccaatctcgtatttttaagcagaatcaataagtcaaccaaactaagttgaatatcattttcttcccctcatttaacctttccagtaatgccaaatgacaatttctttaattcacagattcttgctttgatctaaaatcctcttgaatgcttcttcccttaaatctccagtttcatttatttttaagagactgacttatatgaatgcaactgactttttcaagtaatatagattaaacatttctgggtggccacacttatttggattacactggaggattctctttgaattatgctaattttagcacccaccccatcagcaagtaagtggcatgggtgtgagttttaatcctttatctaggtttctttctttcaccatggctgaggtaacagcaaaaagaaaaaagaaaagaaaatcttactcccttcctggagtttgaactgtgcaagactatttttatatatacttattttttggagatgggatcttgctatattgcccaggctggtctcaaattcctgggctcaagcaatcctttcccctcagcctcctaagtagctgggactacagatttgtgactattcctggctgtacaaagactttccatgtaaacatatcttatccatgttgtgacttccttccgctaatgatctcccctagccattactactgaaagtgtacagtgtaatgaactgttctgcatgtacagcactgttataagacgaggcatttgtgagaccctgatggatgctcttttttgtgtaagtttagctttagagtcacaatttacttccttaatcagagcagtgcttttcatgtcattgagtaacttttatttgcacaatgtattcacagcaatatgcttttgcatttgtaaatttctggtgccttgaacccttacagtaggatctgatcatttgcatttttacaatgagcacctgctcttgttgtccctcagaaccaaatactggtcttactcgtgaatggagggaaagctcatcagcttccttcagcttgcagagctggacttaacaggaaccgggaatacacggagaagaggatgatttctaggcagatgtgtgtgtgtgtgtgtgtgtgttttttttttttttttttttttaaggaagctgaccagtggcagctggagtagctttgttcattacagatgttattggcactgtctttgtagttttctctgtgaagaagaaatggaagattggcaggaagctccactagggggagatgaccagtatctagaattttgtgttgccttttatgtctatttgaccacataggtccaccggttcttttcatttcatcttctcttggtcttgcattccattttcctgtgatcagctggggaacctttcacctctagcagcataaagtaacagcatctgtgatttggaggcgggggcagtaggctattttcccagtagccccagtctttctgcaggaggggaaaatgaggtcaaaagaaagagaacagtaaagtcaagggatagaggtcacctcccttcaccacagatcctgctagcccattgtttgagccttggatctagttcatgataaaagctactgttatgtgtcatgcactgtgctaatattggcaacagcccagttgaaagatgctagtattttctcctctcttttgtccaagatcagacaactaagtgtcataccagacccctattgacttcagtagggatggtaccatgtttgaaaggccaaagaggagtctcagaaccagcaaatgagacacagggtttattgaggtgaattatatacagggtggttcagtagtggcagcctggactcgtgaactgctactgtttgtaaaaagcatgcagtttacatagcattttcgcttagcactctccccctagcgaccatctcctggcaaccttcattcaacccacacaaagggcctcaatcccccgtatggcctgcattccatgaaatgggccaggacttcagatgttcctcataggtaaggaatgaatctctcggttggccactcctgaattccttagcttggaactccaaacatgcattcttcttacaccatagggtcattgtcagggtatgctttcattgctgacaggtgtgtctgccatacagggtcattctcagggtatgtttacattgttattactgtcaggtgcatctgctatacactgaggcacagagattaaataacttagccaaagttacacatgggtaatagctggcagaaagattttaatccaggcaacctggctctagcacccacgttctcaaccaacaagctacactgtcatgcagttattttacataccatctccactccaaccttcccacttatgtgaggcagtgaaattatttctgtcacttccagatgattactgaaaacaaaccaagccaaatcccgggcaggccatgattgggtacgagggtagtaagctttggcttcaacattctggataattggatcttatctccagctgtattgtgtcagtggcaacttgaccaaatactgaggctatttctcaatcaacatttcctttctgtaacaggactgctaggaggagctgcttctcagctctctcagtatggcaaaatgccttgaaaatcttcttgggtgatctctagtatagcccctaccccgtttactgaaactaggtcaagttgctgaatttactagtcacaaattctgctgtggaggagtgtactccgagaacattgcagatgggcattgccatcctaagagtgaaagcaacagtggatttccatgggcttaggccttgaatctgaaaatagagaggctttcatcagtgacgtggataatggaataaaagaatcatatatataaagatttcaaagggccttaaagcaattgtagggggttgacttgcagcttggaaattgggtttaagttgaaagttgcctaaataaattgcagtgatcatcaggttcaaagtgttaggcgcctaaggctgtcttgctatagacccactgatgaatttaagtgtaaaatcatgtcggtgaaaggctggctaaatttgggattagggaggtacaggaagcctgtaatctgtatgattttataaaacattgttttctttgtaatttaacaatatgtaagacacatgtgcattcattcttatatctctccaaataatcgtttcgtagactattaatgagttgctttatcctttctctccctaccccctcattttgtttctctccactcccaccagctctcatgggactatgcaaaacacaggtagtcttattattgagttacagttataagccattgtgagtagattcctctcctagcctcagttccagtagctgtggcattttgggggtttctaggatactgtagcaaaaccagagacaggtgcagtttgctgtatttttggaaactactaattttatgatgcctattggcaccaagagtgtaggcaatttgggtctcctacccaggtcaaaggtatgtacttttccaaagccgcatattattaaggttctgcatttccttttcaactcagtaccttcatcccataataagcaatgattatcaacagaggctaaagaggaaagcttttggtagtacatttgtctcttcctggggtctatctggtgatcttctcttcttataggctctttgtactttgtatagttgatcacaaccattagacctacattcccagatgagatcagatgctcaccacatgtgcgcaagctttttgatcgctcttctgcctttccattgtccagcatccatgctccgtcattggggcaaatacacaatcacactgactctacctagaaaacagggaagaagaacttggttccagcactgactgactatgttggaaacacagaaattaattaataatgctctaagaccaagtgagttgtagcatgtgaatgttcttcatagatatgaactatacaagaaccaccagagaaacagagagagtagatgttaaagccaagttgggagtaaaatttctgctgattgcaaatctctgccccttcagctgtgtgaaatgattttttcccccgaaaagttttcgtgattgcttaaagcatttgctagttttgctaatgtgatttgacctcactggggctctgatcccaaaagcctgtcatttatctcataccacacacagctgaggcagagaaatttattcccagccaagaatctcatagaagttggataattaccccgtggctcaatccaattccatttgagtgtcccccagtttaagcctccccaacaaataaatatagtattgatctggtggttagcatatgaaattggcaattgttcttccccctcttccagatcatttgtgtgtttcacatagttaccatgactgaatttgtcagggttttttctactgggcgtcctacatttctgcaggtcatgatctgatctccagggcttctttatttcctgtctttctgaaatatgtgagtcactgaatgtgtcttagctgtgagctggcctgccatccttactctaaaattggagtctgagttgctgccttacatgcgccagattttgttagggccagggaaacatgttttctttcacttgcagcaatgctttttgggtatagcattctgcctaacattatctattcccttaccatttcctgtatttgattattatttcgttattattcatagaacattacccagaaattattgcaatattgtaattttattatttatgtgaaaacacatatttgtataaatttaacaatgtaaatatcagtagaatgtgagctgttcaatggcagggtctgtgtttcattaatcatttatatcctagcaccttgaagagtatcagctcatagctggcattcaataaatgctttcattttaatgaataaattaaagaatgactttgcactgttagattttcccccattagtatgtgctcagttgtttgaagaacacttctattgtcttcccaacatctattccacctttccccatgggaaatagcagtaatgcatttgttaccaggattggagtcaccccagctctagggataatttttgactggtctgggcctattgtcccagtgttagataccaagaaggggacactattttaggtacccctaagaaagaatgagataaaaacgccaataattataactacatcaactgtaagatgtatttcacttcagatatactgcaatattacaaatatgcctcttacaatggaagtgatatggtgagttggtttaatcagagtggagcttaggacttttgtttggttgtttggtgaacagatgcccctattctcaagtgagaatgaggaaactgtggccctgggagtccctggtcatcaacatcctacaattctgagggtagctggctttagatgtggccaaaaatttcaaagtgatgtaggatgctgaaaagaagctaggttcttgacacagttctgctcaagatttcttcagttatgtgagttaatacattccctttatcacttaagccagttctagttttatttttttaatttgtaacctaaagcatcgtgattcacgtatgagtttcaataaaggacacttagctcagaaaggacatccaatacactgaacaggagtaagaattgttggggaagaaaaatccaagccataatctgggatgaaatatgaatgaaagaatgatatgcaagaggagtacatcccttccatgcactcactctagctaggttctcagatagtaactatttctgctcttgagccaacttggaggactttccattagaattgcagaggagttttccagggaaactttataagaaaataaattgaaattgtccagtttgggggaaaagaacaaaagaaataatagagagacaggatagtgtagtattttgaagcacaggggctagagtcagatgcctgagttcaaatccttactctattgtttctcactcctaggacatcaggcacattgcttacttctttaactcctctttcctcatctgacaaatgggtcttatagaatacctattctttgcagtgtcaacagaatcaaatgagattgatacatgtaaagcacataatgggtgccttataaatgctagtcattaatattggagaaatttagaaatcattttcagttatattccatacccagaaaaattcataatcaggtggcctagccttgtgagtgagtatacaagaataaattagtttatgtgaaagctcaaagatttgggttgataaaaaggaagacattttggcccatagaagctgctagaccacaagataatagacaagtaagattcttatttgtctacattatgtaaaatcctctattgagttggtctagtaaaacattttgaaatagaaggcttgactttgcctccctctcccatgggctgttctattctttcagcaatggaattcagtaactttatttttgcctggttgcccagtaaccgccacttcagtgcctctttctaattcacgcttcttctcttctttttcatctcttttgttgaaagaaacaagttttgtgtctattaattcagacttccatctatagctatgaataaagaaatcattttttatgtttgaaaacacttgattttgctcaaacgtgttataaaatgctgtgtttcaaagaaagatgctatagtctgaatcagagatcagggctaattttgtgtgtactgcctgaaaaggaaatcaggtataaatccatctccaggtatctgtagatctggggctttgctgctcaaagtgtggaccttgatgtagccaggacatcacctgggggcatattagaaatgcaaaatcttagcacccctcccctactgaaccagaatctaaatttttttataggtgctttaaatagctgcaaaagtttgagaatcactgctctctcaggagcatatctggataaaggcagctaattgactataaagcttatcttctgattggaagaaggcctctgtatgattctatgctgataagtgttcgttcttcattttttgtcttttgtattcttctcctttgttactgagagagaaacctaccatttattaggagggcaatgagaacaatagagatccactggtgataaggagtgctatataacgctaaggaataggcaggaaaatatgtcttctgccacagaaatctcacaaaatgtaagggtggcaagtcttgaagagaaccaggattagattcagcagctgttggcaatgattgaaggttgtgcacccagggatgagatggagtggggttaacagacccagggcacagttcaaagaggttagcatagagttaggtcccaggagggactaagtctgagagtcaggcttgacctagcgatctggagtgagtggtttcgagtggaactctgcttagcatggagttaaagaatttgcagagaaaaaatcaaagtcaggagataggaaacagctaagaaagagaggttcaatatggctatagtttggatgtttgtcctcccagcctcacgttgaaatctgatccccaatattggagatggggcctgatgggaggtgtttgggtcatgggagcagatctctcccatgagggagagcttggtgctgttctcacagtaatgcattcttgctctgttagttcccgtgagagctggttgttaaacagagcctggcacctcccactctttcgcttgcttcctctcttgccatgtgatttttgcacatgtctgtttcctttcaccttctgccatgagtggaagcagcctgaggccttcacctgatgcagatgctggcaccatgcttcttgtacaacctgcagaaccatgagccacgtaaacctcttttctttataaattacccagcctcagctattcctttatggtaacactaaggcaactaagacaaaagcccaaagcaataatcagaaaccagatgattcccagaagtttaagaggtatgaaaaaagtaaagcaggagatatggggcatcagccatataaacagctttactaaggagaatatctttttttcttagccagtgatgtgctcttgatgagtgtaggacattgagccttgtgtgtggttccttggaaatctgaagttattatgaaaggagggcttgtggctggagtagaaagagagggtcactgggagagtcagctgcaaacccagaagctgttgacccaggtagacttctgtggtgtgggtggaagcagggcaaggctgggcaggaatgatgaagtccactgagtcaaagaagctagagtgagaagggttaatggaggagccctggttttcctgatatgctagggctgaggagcaaagagttcctgaggatttttggggggcaggaaagcaacagaaggaggtcagcttaagtcaaaagggtaagcaggagtcagacaaacaaggctgttggcctgggatgctgggattttaccatttgttctctgtgttctttcatagagcctgatcggcatgaatgaccctgagcataaatcatatcacaaaggagggcagagacttacagagagcaagagcaagaatctgcaaatcagtgagacttggacctaggtttagaattttctgttgtttaagtcttaatccaaaggaggtgatatcattttgaatatggaataaagcatgctatcaggaaaatttgcaggcactgcaatcagacacactggggctttggaaaattatctttgagctttagtttccatatccataaaactgatacaattctacctttcttggcaggattgttcaaaaagtttaaaacatgtagaacatctagcacaagaacaccaaacacataggaggagtttgataaattgcaacaatataactacggggagtagaaattattcatacttgctttctgaacagtctacctactattgcctcattgtgaaaattttattcttttttcatttgaagataactaaatttttttttgtattactgcatgaaaatactaattctatttctggtgagtaatgagaatgaggacaggtgtaattcttcgttaaaaatataaatgatagaggggaaaattgaactttacctagagactgcacacagcacagccccaggaacaactgtcatttactgcccacttacctgttggagggcatagagcctcaaagaaagttatagcctcttaagtgctatccctgaaaagtccatgtctataaagtgaggcttaaatcaaagaaatgccatttatttgctgaattatgtgtaatgccagctactattgaagttaatggatgggtatagattagtatcctacctgttacagacaagacatttgcattttaacaggggtctccagaaaaaaagctaccattcaaaacagagattcttttacactgggaattttcagtgttgtggcaggtacatgggagagcagtttggagacaggaaggctttcagattttcctatccttggtgctcttgaacactctgtctctgactgagcctcttttctcccgttaatcctggatttccctgacattgaaatgggggagtgggttcttctcaagctattttctggcctgagattttagattctgcaatagaaatatctgaataacctgtagcttatcacacacacaaaaattaaagacaaattcccatgaaaaagtaaggaaataaaaaaattgggcttactggcctcttgatagtgatgagtatggtagctaaaagtatttcctctaaaagctattgtttttcctttaaaaaatcatgcagctttgatgttctggcatggtcttccttttcaacaaaagtccctttaaaacatagcactcttgattacacatccattttcaggtaagctgttgtcttgatcaataaattgatttttatttaaataagaaggaaaacctacttttctggcaagggcatcaatctggttgaccctttgaatgtgttaattacaattgttcaaagaattggaagccatagttttaaatattagatcagttgatcaattataatgcaattcttcagatcacacacttttgttttgtttcaaaaaagcccattgccattcaagttgtctctttatgagaattaacatcaaacaaattaccaatggctagccaatttaagagattaacattgctcaaaaagagcccccaaatggctgtgattcagcagcctttattagatctaattctttcctccttatttgccatgactcatcagttttgatgggaccaactctgtgatcattttcattttgttttgttctttttttaaaaaaaatgcatctgatttttattttaattttccattgcatgggatcatatttattgaagaagggcttttgctcatttgtttgtttttttttaaagtataatttctgcttcaaggaaacagtcgggtaaattataccgaactaccaagcaaatagtattttctctcatgtacaatgagttttttaataaaagttaaaaaggcacttagattgatacatgttgctgctgcttattaaaaagtggaactgtggaaaacaaactctgagcaaatggctgcatttgtgtaaatttgcttttaaaaattattctgatgtagtcattggtcttagaaatggagtctatacaatggtggtatcaaggatctatcagtgcacatatttttattctctggtgctctgatgcgtactgagaacaatctgatgccattgggactttgtgttgcttattcctcctggaaatctccaagcctgaagtccttccctgtgatttaaaaggcgttgactatccgtttttaaaagggtaggatatgtgaaatcatattaaatgggaatatgagaagagagtgttgatgaaaagagtctacctctgtaaaatatttgaagagatttattttgagccaaatgtgagtgaccatggcctgtgatacagcccttaggcggtcctgagaacatgtgcccaaggtggtcggggtgtagcttggttttatacattttagggagacatgagacctcaatcaaatacatttaagaaatatattgattcagttcagaaaggcaggacaactggaagctggggttgggggtttgggggaggggcagcttccaggctataggtagatttaaaacttttttggttaataattggttgagtttaacctaaaaacctgggatcagtagaaaggaaatgtctgggttaagataaagaattgtggaaaagaaagttcttattttcagaggaagtcttcaggtagcaggcttcagagagaacagattgtaaaatgtttcttatcagacttaaattctgtgttgatgttaatgctggagaggtatgatgaggcatgtccgacccccacttcccatcatggcctgaaccagtctcttggattaaattttaaaagttccggccgggctcggtggctcacgcctgtaatcccagcactttggtaggccgaggtgggcggattacgaggtaaggagatcgagaccatcctggctaacacggtgaaaccccatctctactaaaaatacaaaaaattagccgggtgtggtggcaggtacctgtaatcccagctactcaggaggctgaggcaggagaatggtgtgaacccgggaggcggagcttacagtgagccaggattgtgccactgtactccagcctggatgacagagtgaaactccatctcaaaaaaaaaaaaaaaaaaaaaaaaaaaagttccctggctgaggaggaagtccattcagatggttggggggccttagaattttatttttggtttacaagaactatatccaagaatactgcagcatatctgctttagcaagattgaaatatctagggcatttcgcctgattaaaaaaaacaaaatacatttggcattggaaaccaattcgaagaatatatgctacttgtcttagaggggaagaaaaagaaatccttctggtaattactgtaggagaactttaaactgaatcactgaagtaatgaaatggttattatgagcactataagtctgggctgttatgaaaatggaatcttaacgagtagagtgtttgtggagaacaaatcatgcccgacaatacaaaactttactttgaagcaattagaaatttagaggaccaaagaaaagaacatcttttaagatcttaattcaaattagggtcgctgctttttcagcgttttcagaaattcggtgtgtatagaactggaatgctccctgtctttttcccctttccataccctgcccccaacaactcacactaggataggtccttgtttatgcccataataccttgtactttgtagcactaagcacttttgtaattattactacctttaaaaattaattatggtaaagtatatatgtaaaagaatgtatagggtagtacagtttaaagaaggaaaagtaaagtaaaaacccatgtacccaccacccagataaagaaatagactagcaccagtacttttgaagtctccttcatgccactccccaagtaccgcttcctgtccacccagcagtggccatttccctgaatttcatgttaaaattgtcttgctgttttttatggttttaatacataggtatatatcactagaaaatatgccatttagttctgtctctttggtcaaggttatgtttttggattcatccaggatgatgtatcaaattaatatatttagtcattctacagttaatagatgtttgttccctatttgttcttttcttatgaataatggtcttctgagcattcctgcttatcttatacctaagactggaattgctggatcatagactgggaacatgtgcaagttaactaattaatgccaagtagcggtgttcatttcggttcacatcactgtgggatgaaactttcatcactctatacctcattgatgcttggcattatccaaatttttaattgttgccaatttagtggcatgaagtgatttttcattgtggttttaatttttatttcctggttactgatgagggtgagcatcttttcatatgtttattggtcagtaggatttgttcccctcggaaatgtctattcatgtcttgtgtgtttttctatctagttgtcattttattgatttggaggatttgtgcatatattctggataataagtccttgtctcctctatatgttgctcatgtctacttatggtttgtggtctatatatttactctcttttgggtgacttctgataaatagaagttctttattttactataaatgaattcatccaaatattcctttatgttttatatcttatttaagaaattctccatacccaaagtcataaagcttttctctatttgctaaaggtttctggtcctttcaaatttaagtctttaatacttaatgtgtgtgtgcacgcacgctcatgcttgtgtgtgtatgcacatgtgtatgtggtagatttatgctgtctcgtcctcattttgtcactgtggaagattaaccactgcttcaattttgtttatatttatgggactatttaaaatttttaaaacattaaaaaaacttgtatttgagtattttgttgggttgtatttatgcaagaatttgtcaatttcatctaatctatttcaaacgtttgcataaaactgttcatgaaatgctcttatttcttttatctctgcagcacgtttaaggccttcttttttcctaatattttaaaatttgtgctttcttatttgtttcctctctttatttatattgtcagagatttgtctattttataatctctccaaaggacccgtttatagctttgatccatttttggtttgttttctatatcattaactgggttttttatcccttcccaatttcaacatatgggtttctgatattttcccctctaacttcttaattttgttaattagctgaataaattaggttgttcttttctaaggtaagcattttagactgtgaatttccttctaaatactactatatttctatcccttcaatttttaccttttctacactttttaatgaagcataatatacatataggatgatgagcatgtcatacctttacaactagatgagttttcacaaattgaacatgctcatttaactatcaccctaaactaatctcaaaagttttgttttgtaggattgccatgttcattccattctaaattattttcttattttcattgtggtttctttgacatattgcttacatgtaattcacaacttccagacatggttttttttttctggttatccttgttactgatttttaaaataattgtccaaaagctaagacatgggtcagcaaactaccgcccctgggccattgtagtttttgtaaagcttggttagaaatcagccacactagtttgcttccttattatctatggcaactttcaggctacaccaccagcagcaccaagtagttataagagagaccatctggcctacaaagcctaaaacatctaatatctggccttttatagaaaaaaattgccaacctctagcctaggaaaacaatgtgtatgatcctagcatggatacattcaaattttctaagtgtattttccaattattgagtatgatattctatatttgcttgataattatgatattcaagttatctttattcctgaattttttgtctatttgacctatcaataattaagagaggtaatattaatatctctcaatgtaatagaattgtcagtttctctttaaggctctgtcaattttgcttaatatcttttgatgctcaattttagccattatattattattaggctagaattgttttgcctaaatcatgtgttgatctttttatctttatgtagtgaatcttttttaataccaagattgcctgttttttccttaaagtctatcttgtctgatattaatgtagctatactcttaatttctaattctctgacttcagtttctatgttcttatgttttagctgtgcttatatgtacaagacttgatttcaattctgtctgacatacttcactttttaacaagcaagtacggtctatcatatttatttttattaatgatatactttgattatttcatcattttattatgcatttttgtgttattctttttgtttggaatgatatattttgtcccccattttctcaatgcatttttgctctccattagacttgaagctatgaattatatctattttgactgctaattccagatgttttaccatgtaaatgttacaaagttaatcaacttcttgctatactactgccaaataacagaaacctagaagtctttcactccactcatccctttcagcttatatatcactgtatagcattttaggtgtatctttgtaactctacaaattagatagtatttttatgtgctcaatggtctattacacttctttataaatttcttactacttttttctgtgtctcagaccttccatcactttccttttgccaaatatctatgctttagaatttcctttagtgagaatttgttgtgagtatattctatttttgtttgtctgcaaatatatttatttcactatattttggaaagatatttttctaggtatagtgctctcggtggaattgttcttttctctcagcactatcttctggtttctgctgttgcagttgagaaaacagtcatcaatcaaattgcagttctttgtaggtgaacgatcttttcttttttttccccgtcttttgagatcttctctttcttttgttgctatacatttccactatgatgtgtcttgtaatggatttcttcttatttattctgcttggaattcattaaaactcctacattgtatgattgagatgtctttcaacaattctgtaaaactctcaatgatttagcacttcaaatattgcttctatccattctttctagtttcttcccattaaatctgattagacgaataaaaccatcttgcattatctaccatgtctcttgtcattttcatattttcaactctttgtcccgtggactgtatctggaagaactttattggatgtctttcagctcaacagttaaatgatatcaaatccgctgtttaatctgtctattaaggtttaaaaaaatctattaaaattttaattattacattttaatttaaagattgtttttcaaatctgtttcatgattattttgctgtctttctcctaccaataccttcaagctactcttctatattgttaaaaatgtttaatagttattttatattttggatctgctgattttaatatctgaagcgggtctgattctgctgtcttatttctgctgactcttactcatgttgttttgtctattttgttatttttcactagatctcttgtaccttggaaccttatttgctgtcattcttttaggtctggattaagatttagtttctgcagaaaatattgatgcttgttcctatcagtcacctaggagtaccaccaacccagggttattcttaattcaagttccagcttaaagcttttcatgtcacacaggtaacatgaattaggaaagctcacccatgtgtggacaagctttagggaacatacttaagggaattgttttatcctctatctaacactaaggtctagatagatatttatttgttgactccacttttattgtggattcattttttattcacatttacactaaggggtatagcttcttagtgaaagggtggtctagtatacttccattacattgtctgccttagatggatccttgtctttatctcctctttactgtaccaccacagaatttcagcatcttttgcttttagcagaatcctgagaggataaagttgactttgctgcttatttacctcttgggatttctgcttttactcaattttgccctccggattttttactttcatgctagctcagtgaaacattataaagcatattttctttttcataatttaactcagcattttagtcattttcatcagaaggattgttcaatatatttattatatttaaggtcatacagagaatgtaataaatacttccttcccctcctactctggattgtaagttccgtgaaaacaggtgtcacatccactgtcactcctgctgttcattgctgttttacagtaaaattcctggcacaaaatacaagaggacttcaaaaagttcgtggaattaaaagataaaaataaaaaatattaactttatttcttaacataacctatatagagttcaagacatgtgctcacttcagcagcacctatactaaaaaaaagttcaagacacttttgtaattgatgataccagccatttagtccatccctaaagaactgagggtcctgggaatttaaccatgccagtgtagtcttttttacattaactggagaaaagcaaatgtactttaaagattttttaagattaggaaacaaaaagaagttagaaggatccaaatcaggactgtaaggtggacgtctaatgatttcctatcaaaactctcccaaaattgcctttgtttgatgagaagagtgagtagaagcattgtcatgttgcagaaggactctccaacgaagttttcctgggcgtttttctgctaaagctttggctaactttctcaaaacactcttatagtaagcagatgttattgttctttggccctccaacaggcaaaatattttgagcattcccaaaaaactgttgccatgacctttgctcttgactggtccacacctgctttgactggaccacttcaacctcttggtagccattgctttgattgtactgtgtcttcaagatgatactggtaaagccgtgtttcattctcctgttataattcttcaaagagacacttcaggatcttgattccacttgtttaaaattttcattgaaagctctgctcttgtctgcagctgatctgggtgcaatggttttgctgcccacagagtggaaagtttgcttgactttaatttttcagccagaattgtgtaagttgaaccaattgagatggttatggtgttggctattgtttctgctgttaatcatttgtcctcttcaattagggcatgaacaagatgaatgtttgcctcacaaattgatgtggatagtctgccactataggcttcatcttcaatatcatctcaagaaagtgaaaggacaacctacagaacgtgagaaaatatttgcaagtcatatatctggcaatggtctactacccagaatataaaaaatactcttacaactcaacaacaaaactataacctgatgaaaaaatgggcaaaggtcttgaatagacatttcttcaaggaagatgtacaaatgaccaacaaacacaagaaaagatgctccttatcattaatcattagggaaacaaaccaaaatgaaaatgaggtactatttcacacccactagggggccactattaagaacacaaaaaatggagagaggtggagcaagatggacaaacagtagcctccactgattgtcttccctgcaggaacaccaaatattaacaactaattacacagaaaaaagcaccgtcattagaaccaaaaatcaagagaggagagtcaagagtaaagaggactttgtcttgcctcttggataccagctcagccatagtaggatagggcaccagggcagagttgtgaggcccccattccaggccctagttcctggacaacatttctagatacactctgggccagaaaggaacccgctgtcctgaaggaagggacagagtcctggcaggatttatcacctgatgactaaagagaccttgggccttgaataaccaagagtgatacccaggtagtacacagtgggccttgggtgagatgctgagacctgctggcttcagatgagacccagcacattccaagctgtggtggctatgatgaaagactccttcttgggaaaagcagaggaaaaagtaaaggggactttgttttgtaacataggtaccaggcgctgtgaggaagagcaccaagtgggctcttgtggtccctgagtataggcttaggctcttagacattattcctgtcctgctctggtctaaaggatcccactgccctgaagggtgagccctaggcctgacattattaactacagactgactgaagagctcttaggttttaagtgaacattggcagtggcctggtagaactctctggggatgagtggtgttgatggttatggggaaagctcctctgcccatggaaagggaagggaaaagcaggaaggactgtgtcctgtggttcaaatgccagtctagctgcagtaaaatagaagaccaggtagttttttaaggttttttactctaatccctcatacccagacagcatctctggacttgcctggggcctgggggaactcatcaccctgaagggagggacacgaacctggcttgctttgccatctgctcattgtagagccctagggccttgagcaaacataggcaatagccaagtagtggttacaataggccttgagcaacactcagtactgtgctggcttcaggcctgatgcagtacagtcccagtgttgatggccacagggatgcttgtgtcatgccacccccagctccaggaggctcagcacagagagagaaactccatttgtttgggagaaagtaaggggagagaacaagaatctctgctgggtaatccaaagaattctcccagattttatccaaaacacatggaaattaaccaatatgctcctgaatgaccagtgggtcaatgatgaaattaagaaggaaattgaaaaatttcttgaaacaaatgataatggaaacacaacataacaaaatctgtgggatacagcaaaagcagtactaagagagaaatttatagctataagtgcctacatcaaaaaagaagaaagacttcaaataaataacctagtgatgcatcttaaggaactagaaaagcaagacaaaaccaaacctaaaattagtagaagaaaagaaataaagttcacaacagaaataaataaaattgaaatgaagaaaacgatataaaagaccaacaaaatgaaaaattggttgcttaaaaagataagtacaattgacaaactttagccagacaaagaaaaagagagaagacccaaataaataaatcagagatgaaaaaggagacattacaactgatactgcagaaattcaaaagatcattagtggctactatgaggaactatatgccaaatctagaggaaacggataaatttctagacacatgcaacatgtcaatattgaaccatcaagaaacctaaaacccaaacagccaataacaagtgatgtgatcaaagccataataaaaactctccaagtaaagaaaagcctgggaaccaatggcttcactgctgaattctaccaaacatttaaagaagaactaatatcaattatactgaaactagtctgaaaaagagaggaggagggcaaacttccaaacccattctatgaggccagtataattctgataccaagaccaggcaaagacacattaaaaaaaaaaaaaaaaaaaaaaaaaaaaaaacaactacaggccaataactctgatgaatattgatgcaaaaacctcaacaaaatactagcaaaccaaattcaacaatacattaaaaaatcattcatcatcaggtgggatatattgtagagattcaaggatggttcaccatagacaaataagtcaggtgatacattatatcactagaataaaggacaaaaagcatatgattagttcaattgatgctgaaaaagcactggagaaaattcaacattgcttcacaataaaagccctcaaaaaactgggtgtagaaggaacatacctcaacatgataaaagccatgtatggcagactcacagctagtatcatactaaatggggaaaaactgaggcccttttctctaagatctggaacatgacaaaggtacccactttcaccactgttattcaacatagtactagaagtcctagctagaacaataaggccagggaaagaaataaatggtacccgaattggaaaggaagaagtcaaattatccttgtttgcagataatatgatcttatatttggaaaaacctaaatactccatcaaaaaaacctattaaaactgataaaccaattcagtaaagttaaaagatacaaaaccaacattcaaaaatcagtagcatttctatatgccaacagtgaacaatctgaaaaagaaataaaatgtaataccatttgtaatagccacaaagaaaattactttgtggctattacaaatacttaggcattaacttaaccaaagaagtgaaagatctctgtaatcaaaactataagacactgatttgaaaaattgaagaagacacaaaaaatggaaagatattccaagctcaagaattggaagaatgaatattgttaaaatgtccatactacccaaagtaatctacagattcaatgcaattcttatcaaaatatcaatgaccttcttcacagaaatagaaaaaaacaaccctaacatttacatgaaaccacaaaagacccagaatagccaaagctatgctgagcaaaaggaataaaaataaaggaatcacattacctgacttcaaattatactaccaagctatagtaaccaaaacagcatggtactggcataaaaacagacacatagagcaatggaacagaagagagaacccagaaataaatccatgtacctacagggaactcattttctacaaaggtgccaagaaatacattaggggaaaagacagtctcttcaataaatagcactgggaaaattggatatccatatgcagaagaatgaaactatactgctatctctcattaaatacaaaaatcaaatcaaaatggattaaagacttaaatctaagacctcaaactatgaaactactacaagaaaactttggagaagctctctaggacattggtctgggcaaaaatttcttaagtaattcctgggtgataccaacaagcacaggcaacaaccaaagcaaaaatggacaaatgagatcacatcaagttaaaaaaactttagcacagcaaagaaaacaatcaacaaagtgaagagacaacccacagaatgggagaaaatatttgcaaactacccatctgacaaggaattaataaccagaatacataagaagctcaaacaactctataggaaaaaaatctaataatccaattttaaaaatgggcaaaagatctgaatagacatttctcaaaagaagacatacaaatggcaaacaggcacatgaaaaggtgctcaacatcattgaacatcagaataatgcaaatcaaagctacaacgagatatcatatcaccccaattaaaatagcttttattgaaaagacaggcaatcaccaatgctgctgagaatgtagtcaaaaggaaacccccacacactgttggtgataatgtaaattaatacaaccattatggaggacagtttggatgttccttaatatactaaaaatagacctaccatatgatccagcaatcccactactgggtatatacccaaaagaaaggaagtaaatatatcaaagagataagaagtcagtatatcaaagaggtatctgcagtcccatgtttgttgcaacactgttcacaatagccaagatttgaaagcaacctaagtgtccatcaacagatgaatggataaagaaaatgtggtacacatacacaatggggtactattcagccataaaagagaatgggatcctgtcatttgcaacaaaatggatggaactggaggttattatgttaagtgaaataagccaggcacagaaaagcaaactttgcctattctcacttattttggggagcttaaaattaaaacaattgaattcatggagatagagagtagaaggatggttaccagaggctgagaagggtagtggggggaagtggggaagtgagggggaagtgaggatggttaatgggcacaaaaaatagaaagaatgaataaggcctagtattctaaagtacaatgaggtgactatagtcagtaataatttaattgtacactttaaaataacaaagagtataattggattgttttaacacaaaggataaatgcttgaggggatggttacttcattctccatgatgtgattattacgcattgcatgcctatatcaaagtatctcatgtaccccataattatatacacctatgtacccacaaaaattaaaaattaaaacatatataaaaataatgttgatgaggatgtagagaaattaaaacccttgtacattgctggtgggaatgtaaaatggttcagccagtaaggaaaggagtttagtgattcctcaaaaagttaaatgtaaaattaccagaataccccgtgattccactcctaggtatgtacccgaaaaaactaaattgatattcaaagaaatatgtatacatacatgttcataatagcactattcacaatagccaaaagatagaaactgccaaaatgtccatcaatggataaataaataagcaaatcatggtatatacatacaatggaattttattcagctgtaaaaaagaatgaattcctgatacatactacagtatggatgaacctttaaaacatgatgctaagttaaacaagccaggcacaaatggttacgttgtatgattccatttatattaaatatccataataggcaaacccatacagacagaaagcagattaatggtttccaggggctaagggaacaggaatggggagtgactgctcagtgggtacatcccccattggggggatgaaaatatttcagaactagataaatgtggtggttgcataacattgttaatgtactaaacctcactgacttgtttactttaaaatggctaattttatgttctgcaaatttcacctaaataaaatttaaaaattaaaaaagaaatctcaggaaaactgaaagtatagacattgaaaacccctaaagcttactaaatatctgtgccaaagcagagaactgggcttgttttcctagttcctttctatgatacttttttctgcattcacatgtttggggaccattaaacataatccataatatcctccaccatgtttcttttctactttatttcatggaattcttggtgtctatattagtttcctattgctgagcaacaaactaccacaatcttagtggctttaaacaacacatgtttattactcacaatttccctgcatctgtaatctggtgtggagctaggtcctctacacagggctttacagagccgcaagctactgactggaccgcatgctaatgtagaagcttgactgtggaagaatcaacttccaagttccttcagtttgttgggagaattcattttcttgaaactgtaggactgtgtattctggtatttttctggccagtgaatagaggccatgcttagctcctagaggccatcctcatgttctaggggttatctgtagttccttgccatgggaccttctccataatggtcatttactaaatcattcttatgaggagagtctcattccagtttgcaaagatgcagtcttatataaagtgacataatcttaaaagtgaaacctcatgacttctaccatattttgttggcaagtcatgggttctgcttatactcagtgacagagatcatgtgcttgtgtgaacaccaggaggtgggactcactgggggtcattttaggttgtgtctgctacagggtctaatccttaacagcatttcaaaatgagatccagtgtttcaggcataaacacttccataattagtccatggaagtaatgattccataaactatcatgtaaaacaaggagtcaagctcttatcgttgcctataaagattccacacctttgaacttactttgtcttttttctggaaagacagaaataaatgataagatttcaatagaccatggaggtgtacactatactagaatttctaacctctattccatcaacaggtagggatttaaatttagatgctaattgtaattgaatagacttttcaagtcaagcttaaggatattgattacttgtaaaagcctcacccttctcacacccttttgaaccagaaatatttcttctttgctttgagcagtaggataactgattttctttaaatttaagtcatttgccttttagttacctaaaaacatttaataaactaagatataaaaacttttataaactaaaaacatgtaaactaagatacatactttatcagcgtcaaaggtacttctcctctaaacagagtaggagataacaatacctttgacgttgataaagcacgtatcttagttgatatgcattacagcgactccgaagagctgagctgattttaggtttgcttgccctaattgcaaagactggccaattgtaattgcattgaagttttattgcaagtgcactcacatccagatcacagggaaccattgtattttttatatctagactactatccaatgatttagaagatctgctctaattttattcagtgtgttctttctgagtgctataataggcttttgtttgcacgcaggcacctaattaaaagagaaaaaaaaaatcccttgttaaaatcagctgggaataatcagaatgatcattccatggctcataaatattacatgagcaatatgggcgcatcagtaatatttaactgttttccagtttcacttaaaactttttattctaaaagtctgcaagcccaggagaagattagtactttaaattcttaatcacaagaagagctcacaggatttctatttacagagatttggtttatttatacatattcaaggtttattacaaaaccaacatgctattgctgtggccatgtttttagtctttcagtataggaacctaatgtggcttacccagagtccccagggtgagatgcctgcattccctggatgttttgcacttcaatattttgattgcccttttttgttgtaatttgaattccactgcctttagagaacttggagcaaagggatatgattacatcaatctttaaaaaaaataagtcagatagagctttcattcaaaaattgtatctggaattccagaaaagaaatgcaaagaggaaaataaataggtggtgaagaaatttacttagagggcgaagaaaattcaagccccactggagttctatttatcacctgctatttgccctcaacctctagcagcatggtggcctctttgtggcctcacaagccacttcggcattattcctcctcagtttgctgtctcttcttggtggaaggtaagggagtagaggtgggattcagggtgatgaaaagacccttgagttccccctggaggctcaaatgcacaaccaacaaatactgcattccaacacaatcaatgatgtaatgatgtatgactttcctggtcctttgtttttttttttttggttttgttttgttttgtttttgcaaatgatacaattcctccatttaaaaataaggttttattccaattgtagtttatttttttctgtttaccaaacacctttttaactggagagaataggttatttttatatctttttctaaaacattaggcttttcagataacaatgtctatggggtacctgctgtggctacatccctatattaagcatcatgggtgattacatttatggagaaggtatgggtaccctccctcccccacaggttgtaagcaaatcaggggccatgaataggaattctaattgtgtctccagtcctgagtttttcagccttagcacaatggacatttggagctggataattccttgtggtggagggctatcctacacattgtgtgacgcctaacagtgaccctagcctctactcactagatgtctgttatccccctgccagttgtgacagccacaaatgtctccaaacattgacaaatgcaccctggttgcaggcaaaattgctccctgttgataaccactggtcttgggaaaccataagggatggaaatagagagtacaaaaacaaaaacaaaaacagaaacattcattttaaatcaacgtgttctatagattactatgtctatcttgagccagagatgtgttgtataagtcagggatctgacactagcatttttgtgaaaacaaagctctgcatcttcatgctctttaaagttacttttcaagagtttttgtgctgcattaatttcaagagctacaatgagtttaaaggaatacagtcagttttttgctctttaatacattttcaagtaggtatttgtaaatatgtctgagggcaaagaatattcagtgaaggaagaacataagctcttgactagggtccaattctgctaattattttgtgatgaacaggtttcctgatttttttttccaaagagtgatttatgtactaatagcaactgcaacagaatgaaaatatgaggtgataaatttaaggttactggtgtttgcaagtaaggcctgtcttcatatagaccagtgcttctcaactgagtgattttgcccccccagaagacatttggcagtgtctagggattttttgttttcacaattgcacgaaggggtgcaattggcatctagtgggtagaggccatggatgctattaaacatcctacaatgcacaggacagcccctactcactgagaaagaattctccagccccaaaggtccatagtgccaaagttcaaaagccctggcacagatataggagaacgatggattttatcacaaaaggtgacttgaaagtcagagggatgttattttttcccaaaattactcccctaatggcctgtggaatttcattcctttggctctagtacagacctctcattctcttcttttaaaaggcagataatcttgggagaggtaaaatactgagttactacaatatagtcaggaccctatagatgatttgctcttgtgataagaagattgcaggatagagtacttttgaggagtgcgtttgagagtcgaagaagagtatttgacttacggggggagctgctgaaagaggcaatggagtctgttaagtttgtcctcaatttcttatatcatttcctgtggttggttgtttctttggttcacacacacgatggcaaactgtatgttcaggtgtgtatgtgtatgcataagagttgtattttacattagatctaaaatactatttctatcagatgaacttcccatgctttctaggtcttcactttgtgagtgataagggggcttattcatctcagtaacttgaacagcccagagtttacacttagtccatagacttctagaagacatcagttctgtaagaattgatgcttagtctttcattccagctctgcttccatgtttttccttctcattgttgcatatttgatgtgttatgtctgctctgaagtaggcctagaataatttgaaatactggtatcactttaaaaatccttttttcctggttacttttccacttaaggctctaaaatacttgcaacacttctcttttttttctatcaaaacagcttgaataagtggtctttgggcctttatgttttctagaataagtactttctctgtgtgctgaaatgtttctcattgccaaattacagttctttacaatgaaagtgggtttaattaagagtttaaaagaaactttccaaagagatctgaagaacaaagttgatcaccaataatgtcacactacagttctttgagacacagcagtccctaaaattgggctttcctgacatctgtttcttcacagtgacatactgtagcatcttattattttttttcaggcacagatcagcctggaagaggtcccagagaaatttaattttgtcattccaatcgttcccactcttgcttgggtccttctatctttattttctgaggtttcccattttagctgccagtaagctgtaaatagagtttaatcttcaatatttcagacttctttccttaaccaacaggcacaagggaagattctacttggaaaatactccttaaaattgaagataatagatttttggatatcttttaccacttaggtatttaaacatgcatttatataaagtattaataaaaacttatttaaattgtcaaaatctcactgtgtctgtcaccataattgctaatataatccttcttggtcattcaaaggctttggccaaacaagcatatcaacttctcttctcatttggcatctgtcgttcctggggaccatactgtagttgaactagaagtgtggataaaatgattcacttatgtggttgaatgtccatttccataattaatatcaaaatacatttgaaatagcataagagtgctccaacctttatgtgcgttaggacgtggctgaaatattggagacaggaagtggtcttcaagcaaatttcacattttataagtgcatcaaggccatttttttcagaatcttttggcaatattactttaaaaataagtgagttctgtttcataatcaacaatggaacttaaaattgtcccccagatttgccaggcataaagatttggttgtctagataggctctccatttataaaaagaaaaaaaaataaagcagacagtatacctaaaaaatataattccattaggtagtgcattgatttttgtaacacaatgtgctgcctctttgataaattatggaagttgctacatttctgtcagatgacaagggggaaaattaagaaaacattgaaatatttgcttctggaaaattctggaaaactataaatagtgtgtgctttagcagaagattccctctccagacacccttttgaacctccctcactgcctttgcaaagaaaataattaaggattaacaatcatgttcccagagtggtgacaattagtttgagaagattctccgggtaagatatgattgtgactttaggaaatgcatctattgtgctcatctttcatcttttaactcccacaataggtataaacatttaaaatataagctgcaaataaaacaaaattctttcagaggaaaacaataatgcttcctttgtgaaatcatttgctgttgctattaattgtacagcccttgaggctgtagacaatggtttgtcttttttcagtcaatatgaatcacagtgcctggcacatagtaggtgcttaatcataggttatcaagcaaatatctattacctattatgtttagtcattctgcaaagaactttggtgggggaagggaggcaagagaatatagaaaatgtgatgtagttccgcctttcaaggagatttcaaggtagctgggaagacaagatagacatatatgcatatatacaaaatcagtgcttaattaaatgtttctgggatatagattgaaaatgccgtaggaatgtatagtccttgcagctctaaaaagtctggagagggtgattactacatggcttaaaatgaagcatagacagagtgaaaagaggaagtgaatattctaaatggacttcagtatgagggaggttcttctgtctaaacaaaggcatggcgttgagaattagcctgggatgcaaaaggggatttaactatttggtggtgttaggaaacaaggcagaattttaacctgaaataatatgtaatagcaagccctgaagattatgagatagggtatgacatgaaggggcatttaagaaaaatggtttagacgtagacttcagaataaatgggaaccaagcaaaactaggctcaaagatgttggttaggaggctgcttcagtaattcaattctaatgaaggattggaaaaatatcttcttggtagtttggatttggaagaagaaggagttcaaggttgaaaggaaagtacaaattgtcatatttcctaacatgcaagtattagtcacttactgctgtggtaatgctgtgtaacaaatccctcccaaatttagtggcttacaataatatgcatttacttatcttgcttataagtctttgggctggccagggtggctttgtttctggctgcaacttggtggggcttggttctaggttttggaatctgtgcaccaggctttgaatttcaggcttcacttctacaacatgggtctcatggggcccagactgaaggaacagaggctacctaggatattctcttcttatggtcatcataggagggcaaaaggccaagccaatttgcacaaacatatttaagacttctcttcaagttatatttctttggtcaaagtaagtcacatggcaaagcccaaatcaatggggcagggaagtacttaatgtacctcaaggagaagagaggctaagtgagtattttctgggcaataatccaaactttcacaattggtgtgatttttctgaaatgcatctgcaaatgtcattaaccttaaaacctttacatggctccctgcttgtgtaaaagtcacactttttactaaatagggttcttcacaatctcctcacatttctatccttcttctgctgtgttcccacacctatcttttattctgatcgcaatgacctatttccaattcatcatgaagttttatgcctttttatgacacagtgttctttgtgcctaaatgctccttctgtcctttcagtccctcaagtctctaagtgttgaaggattttctgattcccaccccctgcaaggccgcaatcaatgttacttatctttattcccagatagtttatgtgtaactccggcataacacctactacattttgatgctgtgccctgagggttggacatgtggctcattgatctatatatccctttcatgtgtggactgaatgagacagataatgatggtgcccttagaaagaattgggaacttgggaagcagaaccaaaggttttctttgttttgtttttgtggttgttattgtgtagggggatgagagataggaaaatgaagattcttctgttttggcatttttaggtgtgaggtgagggcaggacatccattagctgaaagtagggtctggaacaaagttgagagatctaggtgagaaaatccaatttggctaccatcgcattaaacttagattgaaatctagaccatggccttactgtcttttctgcctaactgcagtctaaaatcctgtttttgaaagttctgccgaaaaaggggattgtttaaaaaatctctttgtagtcaatccataaatcatatccaaaccataggtaatgtgtgattgttcatactcagaggataaattattgttttcattagctttatgtaacctacctccaaaatttttatttcttagtattgatgaaaagttatgaaaactttgaatgtttctttaggaaacaacttgtctttccaaacagcttgcatcaggagcagctgcacagtcacttaaacaaactagttgactaagtgcttttcagtttgtatgggaagatatttttcctttgcttaataataataaaagagaaatatgctttactttcttaatgcagggacagttcaggatccctatctatataagctgtgtaatctctggataattttatgtgtctatgggatacacagtaaataatagttgatcatctgaccgctattgtataaggatctcatctagaaagcccttgcacgtgctgcctcctggagggggcttggaagatggtttcctgtggaactgcctcacctaccacataactttatcctgggagctgatatcctgtttctatccatgtccacagggctggcacccctgagagttgccatatttgtccatgatgtgccactcaatctaaaagcaataaagatattgctagctatacaacatccaaactgaatagttcagcttgcaccatctctatgataagcattccaaagaaacccaagaaggaaagagatctagaaacagcacagtctcataaattaacatggagtattaataatgaaacagtaaccattgaatcagaaaaccttcaagttgagtgaatgttctttagcaattctgataaaagcaaatgcattaagataaacaacattgggtgtattgcacctattccctcaatttgacgttaaagcatgtttgaaacataatgggggaagttagagcagttgacaaatttaccatggcaagataagttagcacatgcaaagcaacgtgacaatcatacttgtgacaatcacatggggactgggtctgcatctcctgctgctgataacagtacagactcttaaaaggtagaaagcaaatcggaatgggagattacagggaaacaggcagaggaagcaattagcaaatagaacacaccagctccctcaactaaaaacctcttcacagaatgattatgaacatctgtgcatgctgctgatggctctgtctgtctttgggagcccatcagcgatattcaaaacgtagtatagacgagcctttccttgtcaccacatcaagcacaccatgaaaagattttctgtgctttgcattctctcctactctttgacgaaaagaactcaacttgacatttaaaaagcccatgcttcagaattaagcttgaggtgataaaatgatatgccttctcagatttattacttttttaattataccaaatcacacatcctaatgatatttttaaaaacccactttattgtattttacccacttgaactcttttaccatctctgttctaccccctctcagctcctaccacatgaaatattttctgtaggttttcatacaagcttggattaatttgccccaattaattttggcatagagtagagctgtgaaaaaatctgtgaagattttgttacatggagataaagtggtacataagccaaagaagcatatctgtatttcaactcttattttaaaatatccctacaacagtgattggaattatgcaggagaaacaaaggtgcagtgagtcaaatacaaggcagttttgatataaatatgcagcagtatttaacagaaaaagttcaattatagtactagtataatagttcgaagatagatgattggcttatagagaaattgtcaaacatgaggctgagttcaggttggtcagagccatcctctactcattctttcctatttacagtagctgccttggaatataatttccttgcccagaacatacttccctctcccttcttcagtttacaatcatacttttccagactgaactcaggcatcacccaccccagaaggtctttccaatccctcaaactagatttggtgtcttttctctctgcaactataacatcctctggctaccttctttatcacactgaattactttactcatttgggagctttttcctcataaaattgcgtctttcatttcttgagtccccggtgccataagattttttttgaatgaatgagtcttttatttgtaaatctgagttttctacttgatacaatttgtaactcattgggtacatttaaacaactaatatgaatctatttatagtctttatttatcttgtccagtgtgaatattcatgcattcagctacagaaatgttaaagtacttcattgaaggtgctgttctggtctctattgatgggttatgtaatgaaggtatctgtactgtttgcctttctaaaatcagaagaaagaggatgaagtcaggtatgcacataaccttaagagtttcagatggaagctggtgtatctctctatatacaccccactccctggcataacatttaatgtgtaggcatttgcattaattaaggttggttgtgctagccgctataacaaagactgaaagacaaccacatctattatatgattcctaacactccttcaaggtggatcatgtgaaattgaactgaattggaagtgcaggagtttcagttgacttttctgatgatttacttgacaatcactcagaaccttaatcgaaaatatgagaaggtgatttgtgatagatagtttaaattaagaaggcagtcaacctagagaaagaagggactatacaaatgaccatatgtttctcagatgttttatgagtatggacaaatattgattcaggaaaacaatgatgtccataccatctcctccaacacagagtgcctgaaactaagaaacaggcattgttagaaaacaaaaccaatcaaacaattaaagaggaggggagaaagtcatcctatctagtacactcagaatatcaattttcaattttgaatttttcttcccaactagaggcttgctagaatgacttgacctccaaaattgacatatttttatctttgtaattaaatgagactcggaattcttccctataaatgaattctttagaatagccattgcattaataatctctccatcatatttttccagagattattggttttgaataaagattgacttgccatcattaacaggctggaaccagtgggctttcagaaatgatgaactagagtggaaccatgaatgtaatgatgtctgtgtgtaatcagaatctaagaagtaaataataattgcagctgttactcttcctgggggccagaagagcattcattgacacacaaagctttgcctcaaacacaggtttaggcggttccttggaggccagttctcataatgccagaagggaagatacaaaaatgtgaccacagggtgttggacttccttctcatgcattctgtagagcatttattacccaaattctggacaattaaggatgcattttaattaactttctatctctccagtgagttcttggcccctcactcccctttacacagctcaaatgatatataggagcaatagccggcctgcttctgttcatgtaggtataggaatcagttattttccaggctttttcataggcaggcagctttgattgtgtttcaggtcagcagttgcagaaatgtggtagcattattcctagaattgtatttctaattacaggatgatgctatggactcatttaaaacaagtatgtaacaaaaaagccaagtaaaattaagtaatgttagaagtcaaaggtgaccaaacagcattcctatttctgtctaccttatgcccaatttttaaacccagaatcttagcataatagtgttgacaactgagagcctttgtttgtgttcatttctatatctccacttcttggaatggtgtatggcacatagtaggtgctcaataaatgtttgttgaatgcatgaagaaaccctgttggaaactaaagaaggaatcccctgagttgtcagccctgtgtttattcattcattcatcagaccattattaagcagttactatgtatctcatagtattgagcgttggaggtgcaaggctgaatattgcatgcttaagcttctcaagcctagggagatagggtttggcacaggcagacacattaatatatacttactaacacttgctgctgtagacacaaacttcagtaatcccactaacagaggagggaatgggaacctctcccccaaagacccagaccctgagatactcttaggtggagttttagtaaaataagcagggactgaataggtgtccaccaactactctagaagctgctctggcattaagctactcatagcacacccccattcattccaggaattcaaattcaaaaacacaagctacaatgactcagaagcagcagcaacattgagctgggtcacctcctgtcattcctacctgttctaagcctggtaggggaagagagtctgagatctgagaggactgatttcaaatgttagctctgcaagttgctttatattttttaaaccttgatttctttatctgtaaaatagggatataataggattaatagagccagttacaggactaagggaagtaatgtattacaccttatttagggcttggtacatatacacccattaacttaattcagtttggcaagtgtgtgtgtgtgtgtgtgtgtgtgtgtgtttgtgtgtattttttaagacaaagtcttgttctgtcactcatgctggagtgtggtggcacaatcttggttcactgtaaccttcacctcaggtgatccttccacctcagcctccagagtagctgggattacaggcatgcactaccacacctggctaatttttgtatttttcgtagagatggtgtttcaccatgttaaccaggccgatcttgaactcctggcctcaagtgattgcctgccttggcctcccaaagtgctgggattacaggcatgagccaccgctcctggcccaggcaagtatatattgagattctgttggggatctattagttccctttctcatttgtcacctggttcctttcactttcccctttaaaaaaataaattcatccacccaaatatacatcattaatataaaatgcacaatttttttcattatgctttatctcaggctgcagacaactgattgcatgtggacatttcagacacatgagttcctaacataatgagctcagctgaggttccagtcatgaatctgcctcatctctccttccttctacttccacaaaggcaggctgggccaggactggctttttctccctcttcttccccctgccttgattcccaatgctggctgtatcatagaatgacatggtgggtgctctagaaatacccttgggtcttaccttcagctatacaattgatttgagcctgaacatcattatgtatcaaaagttccagaggttgaaaacccctgctctaaaccagagctccatgtatgtcttggtaggaaagaggacctctgcctgaggccaaggtctgccattctgattcgggtaaatactactgccaaaccaaagccatggaattctgattcagctggcactaggtgcttgctcagtcactgtcatgggatacatgaatggcaattttcctggtttggacagaccaacagcatgcttaacaactttgaacatggcctttgatctgtatcaccacatctaatctccatgcagcccacatagtgtttgccaggctctgttcaccaccaagcctggcctggctcaactcaaactaggaaccatcatctaaggaagttaggccctcaaattcttatattgtttgttgccttggtgttggctgacccacttaaaaataggaacaaattggaacaggttagattttctgcctctgactttgtggttgtgttttctgttcatgatctgtaattgtctctttatatctgaatgtttggtattgttttctgtctgctgacctttttttttttttttcatcctcagttgatgttgactgtctgtctctgctgcctctcactgccaggggtaaacgttctgtccagcccaacctggctgctaggcctctgtgatggggccaagtaatcccccatccttggagcaggaaccacagcctgctggcctggcactctgcttaacttcttccttgcattatgtagatctttaacaccccacatataaccttcatcaccatcccctggaatctagaatagaccatcagtgatttggagacaaattattttagtagcaagatcgatgaacttgtcaagtttcattgattagcatttattagactcatatctaactttagggaatgttttaaatgcctaaataacacatgaaatatgcctcattttcatatgtatttattagagttaagccttagtaaaccaaatgtctttctatgttattatttttcttttatccacagtctgaagtggggcttctcaaactatagagtgcttaagaatcatctggagagctggtaaaacacagactgctggaccccactcccacaggttccgattcagtaggtctgggatgggaccgaagaatctggatctctaatatggttccacatgatgatgatgatgctggtctacaggccatgctttgaatatagccctggcctaaatcacagacacccgatgttggcttcacagtttatatctgaaattcagcttgagcattattgagaattcccagcatgaaggacctatgacagaaaaagataatcatttactgcttctctttgactattatttttttccagcctagactgactccattttatttccaatgtttcctttaatccctaagtacctggagatgcagaaccattctgtagaattttattgtcctagtttttaccccgatgaatcatctttcgacagacatgtgagccctcagcaaatgcattatgtcatctttctgagcgccacagagagaactgatacgcctttggtctgatgtgaaatgatggcttcagtgtgcccaccatgctgcgactctgacttgggagggttcccagaattgtgacagaaaaccctttggctggtgccaagtggggaaggggtgggcttgtgattctgtttctcaaaccacccaactccatgcatgtgtgagcagatctgtctcctcccaggctgccacattcaaaagtgggatatatttttagagacgaaatcattagtcattagtctctcccaagattctttttttcccgttgagtaaattttaagaacttgatctttatgagaaaattttcaggctttaaaaaaaaaatggtaatgattgtagccttggtacaatgaacccatttgcctcccttctagacaaaggcagacttcccacagcagtcactgcctgaagctcctggtccctacatccaatatccaaatcagcttgatctttcacatcttattagaaaagctcctgcctcttttgattttctggtcccctcaaacgtaggatttcaaaaactaattttatcatacactgaacatttaccctttaagcttattataaattcttatgatggaagttgattcttagcaaaatagccctctggcttagatatgtacaaaatttcacataagaacaggaggatttgatagatatcatcttatattgaagaagggataactgaaaatgagctttattggatatctttaaatttggtgttaaaagaacttttaacatgtttccattgcttcaggctaaataaatgtggtattaatggtttcaccaccagaaaagccaccacatttgccaatttttgctcttaattaaactgtatctgtatatgcatagttggaaatgtcatcatttagaagctcatcaaaaattcataatcacctggtggctgataaggcccagccactccctaggagggatataacacattgcattatagactccagactccctccttctccacagctgccacatcttacttttacaatttaatcttactcgatgagactgagaccatcaattttcagagagcaggaggtagattttcgtaaaaggatataaggaactcaaagagaaggaattctaaaatgtgaccacctgaagtccaagtctgtggtccgaaactagaggaagggcccatcattgtaaagcagccaactgtagcttgtctgctttggtgagatgatggaggaggagagtgagggtatatgagtccaggtcagtcttctcctcttctacttaaaagagttaagtgtggcaaatgaagatggcccaaactctttgacttttctctcactaaaggaagatctctatgtctccttacttgaatctgagtgggcttcgtgattgcttaaacaatagaattcattgcgatgctgctgtgtcagtttctgggcccagacctcaagaacaggaagcttccacagtctgtcactggaaacacccattcttggaacccaatctccatgctgtgagggagccaaagcagctctgtggaaaggaccacattgagagtaactaagactagctagtgtcagcttgccagccacatgaataagccatgttggaattggatcgtttttagcttcagcagaactgaccccagctgaaggtggccctgttcaccttggagattgagcagaaacgtagatagatgatagactgttatttcaaactgctaagtttcaaagtcattcttcttgcagtaacagatatccagaataatagcatctcttttttctactctttcccatggcttccctaagagccattactgagactagacaagagctctaaggccagagcctttcagacagggtcctgcaggagcttctgaaacccaggatgaccttggatgtgtcctctcaatccttttccctggcaaatgctgtcatctaaaatactctctgtaccttagcctcgctccatcatccacacactgttgccttccttcctccagagcccagtgattagctaggtaacatgtttggggtcaagagcaagaaatggcctgagatttcctacctgctactggtcaccataccaacagaaagctttttaataaagagtaaaagcttctcggtcctctatatccccacttaggtgacataagtatgcccttacaggaataactgaaatctttgatattgttacattcttggcagggattggtgacatcaactaagagtaaggattggcctgtcagtgggcacaggatggaccccatgcccccatgaatgctaggagggtaaggacactcaccattaagagggggaaggagagagacactgaagaggaaacaggaaatgggcagggcaccagaaatatacttaggtggtttatcactgactaatagaggctgcttgtgagtcactgcgtgctgggccaatgctaaatcattactgtggctagtactactgctccttttacttgctgacatagtgaggctttgtgccaagtactgctccaacaccctgtatgaattaaggtaggtgctgttagtatccctgatttatgcccaaggaaactgaggcatagagcagagaggatacttggccagagtcacgtgggcatggcagtgtattatcagaattcagaaccagtattcaaccccaggggttctggctctattatttgtcattggctttggctgacatcaggactttaggcacagaagctgagggaagcccagtctgagttcacaatacactttttgtctttggcttatgtcaagcaccagaggaattgggctaaggggtacttcatttttcttattttaaacacattgtaatctcaaatatatgtgcctttgcaggctgctcaaagtcatcctcagcagaaggcagaatataaataaacaaatacacagataagttatgaaggaaaatgtaagatccatggtagctccatgaaataagaattaagatgttggggtgtagcccatcatgcagctagcccagtggttttagctcagcagaaatgctgacccctgaataccaagaaggaaggcctggttggactggatgactggtttgctatgatgaaccaggacagtaggtcacatctacattaggcaagtgttcctgcatttatggacattctaatatcccctgtcattgtggcttgagaaaatattaatttttgcttttttttaaaaaaatgtagatgtagattattttagcttgcaaacatttattgggtgcccacagagagttaaatgaatatttcatgatatgtattttgccaataggatagcctccagttcagagaaccacctgcttatattgaaatctttcgtttgctttaaattgaatacataatttaagctgactgtaacacctcctagaggcttaaaaatgaatcgatttcttctcactgggcagaaataagtagactgtctgtaactgtaaagaatgtgagccatttcagtagatcttgtgttctcaccacacacaaaaaggaaactagtaactatgtgaggtgatggatattttaattagcttgattctgttgattatttcacaatgcataatatgtcaaaatgtcaagttgtacaccttaaatatataatttttatttgtcagttatacttaaagctaaaaagatatgacccattttagaaaagcggttatttttttaaaattcctacttatatgtcaaaacaatgtagctatccaatacaaatgcaaagtccttacaaatattgtttaaaaattcatgagtctagtgtttaatatatttagaacaaagccagaaaatttttacagaagatgtaaaacaaatgtcctgttattattactattctgctttttccggtgtttcataacagctgagtaaacaatcaataccaaatagtaaagaagtgtcgctgagcagataatggacttgaattagataaacttggcctgggtagactgaatacaccattggggcgtattattctcacttacggtttaatctgatagctaccaacttgaagttgatagctttaaaatgttggatgaaaaagagaaagcaactgtctttgtaaggaggacaaacagagaagggagaatcagtgtaaccagcacaggaaacgtacattgcttgtatcttctaaagtgttggagaaaagaattccctctactttggtcgatgtgggagagctcttttgtaaaccttttaaaatcttaattaagtttctaaatttaatgtttatattatttttttgaatttagaaacaaaatagttttaaatgactggttctcataaaaatagtaagtaaacatggcttatctgggccatgattattaatttactaactagatgtatatacatgtttattttgggttccattggcatcttagttcaacttaagggaaagcaaataagcacagagagaccgaatgaggtatactgagtagaaatcagaatatctgggtttctgtcccagttttttacctcctgagtagttgtgtgaccataggcaagtctctgtgccttaatttctcacagtgtaaaaatgtggataatgacacctactttctctgtgccaggaagttaccttgatgcataaatgagaaattagatgggataaatatgtgcaaatagaagattgatatacacaagcagatattatcattaaattcttgtaaacgaaaaattctcttaaaatacttatgatgttactgctctatttagggtaatattctaggtttttataaagattaaaaaaataaataatatgtagtttctatagtccattccagagcttttaataatacagggtcagcaaatgttttctgtgatgagccagttaggcaatgtattaggctttgtgggccagattgtctctgtttctactactatacaactctgctcttgaagcacaaaagcagccatagtcaaaatgtaaaataatgagcacgtctgttttcaataaaactttatttacaaaaacatgcaaaggaccagatttagtccatgtgctgcagtttgcccatcctgcctctaatcagatagatgatgtgcaattaaaactataatatgagatcagaatactcaatattacaaacaaaatagatgaagaatgaatggcatccagctaaggcaagaaagtcttctaggagattgtagatttgagatagcccttcaaggatgtgatcatgtttggacttgtagaggtgaagaaagacatcaccagaagaaaagatagcccaagaaaaagtacaaaagtggaaacatggagaagatatttgagaaagagcaagcaacgcatttggcagatctataggggtagagttagaagcaagaatgcactggagtgggtgtaagacaggaaaaccatatatagtcagttaaacataagctatactatttctgacttcaacccacccccttaatgaatactaagctgtagttgttaggaaagaattacttttatttttggttggttagaaaactcttacatgtttctatgttgcagaatcattttaggtatttctaaggatgttctgcaacttgtaatcatccccaggggtggtttgtttaccttcatgctgcttcacacattactcatcaatccatgaagagttgcacgtaggttggccactccgaggatagaaccatgaggaggtgtgtctgattcagagcaggaactaactttctagagctacactgtccaacatggccagccactagcctcatgtgactatttaaatttaaatttaaatttcagtgattcaatcatactagccacatttcaagtattcaatagccacttgtgtctagtggccacagtactgaacaatgcagataatagaagatttttcatcatcacagaaatttctattggaccatgctgctcttaggagatgagaaaccaagcaaccttgaagtactggcttagactcccagggctggaggtttggatgacagttaagacatttggtaactgttagttcattagcaaatactttactttctaagtattggttttgtcatctgtgatatggaggaataattgtacttttttttaggtggttatgaaggcaaaatagtggattgctctttagaagctgtaaaatgctacataaatataagacattgttgtcatttcagtgataccatctctgtgctttcaggcaattctcattatttctttgcttgtttctatatcatttgcaaatagagatagttttacttctttctttacgatctgaatttttttttttttttgatggagtctcgctgtgtcaccaggctggagtgcagtggcgcgatctcaactcactgcaacctccgcctcccaggttcaagtgattctcctgcctcagcctcccgagtagctgggactacaggcgcacaccaccacgcccagctaatttttgtatttttagtagagacggggtttcaccatgttggccaggatggtctctatctcttgacctcgtgatccacctgccttggcctcccaaagtgctgggattacaagcgtgagccactgcgcccagccctgaatgctttttatttcattttcttgcctaattgccctggctagaacctccagtacaatgttgaatagaagtggtggaggcagacatccatgtctttttttctgatcttaggtggaaagcttttggtctttcaccattaagtatgaagttagctgtgggttatttgtagacatcctttaccaggttgaggaagttccctttttttctaagtctgttgggttatttttttgtttaatcatgaaggtatattggtccttgctcccttttgttcattcaatttgtttaacattttttcttagctcttcatttactttttgctctcttagctcgttatggtactagaaaccagctatgtgactggttatacctaccattccctaaagaatcttctatctctggaaaccaggaaggccagacaatagtaaatggatggattaggcaaatccatggcatctatgttaaggctattgctaaagaatcaatgcaaaatttgtgtcttactgtagtaggaaacatgctgtctcttgggagaagaactatataacattagtgtttataacttattgttttgtcaagaaaaaatgtagtttattgatttatatagtagccttcgatggggcagaaaaagacagaagaaggagataagagacaatgaaggatgggaaaggaagggacactaagttgagaaaacttcatgaacaagacacagaagtggaaaggatgatgggaaattcaagaactagtgagtgatgagactaaactgacgtatttgagttcagttgttttgacagcataagtaggtagtatgtgaatcctagaggtcttcccataatgtttcaatctctggtcagatctaccaaacccagctctggaatcccattgtttatagtggtctctggttcagagggagtcattaagcagtgtcttggattctaaggaaatgtctctcagcagaacaaaaaaattaactctctacttctttacaatcacaagcttagcattgtattacattgtttcagaggcctttctttctccaggaaaggtaaacaggttttattgtaccttccctccattatatccccaactttccattatgttctgtatgttaatctgaggagtcatcaatcaagccctttgtattcatgtcaagaacagatttatgacctcccaaagatctcgccactgtggggtacatggtaagcatcatctccagggcccttgtgcattatattcctctctatccagctcagtttcaaggttaccttgttttggctgcagtgccagtctgctgactcatgtttagtttacttgaccacaggctattttctcaagctccagtaatgtcattcctatcttaactcctgtatcaatgaagggctaggatcagcttctttattgtccatttccccttccggagacatttaccattttacagctccctctgcctcctgggtatccagctacaattaccattagtacatgaacctggcataggccaatttctgaggttattagttttttcttcctttatcatttgacccaggctgtgccatgtttgtatccacagaattctccagcttgtcagaattatttcaaatgtttcccttcagctgtcagtcacatccgccaacttggcattattaggaaaatattacatgagtatattctttaagcccattatgtaaatcacaaagcatcatggtatactgagaactaacccttatggaactgatttaatgcaaaccatttattagcagttcttagaaaatgatcctcaaatcagacatattatataactttttttttaattttagttttcttgacaagcatataacgtgcttattaaaaaccttactagagccaggtctcacttttcccccatgccatgaatggagaggagtcatctactcagatttcctctataccttcattcagaggacgccagccccagatttgacagcacagtcactggttttcaaccgtgcctcagtctactgctgataatagacagcaacaagtgacagggagcaggagctacttaaagtctatcctctggtctctctgctcaaacaagagagaagacaactgctatccatgaagggccaatctgctgttccagtaactcatgacattcatcattctgctctaaattaactatttttatggcatttagaatttataatgacaagtgaatcctatctgccctaatatttacaagttcttatttttaatgctacattccagttgtttcatgggtctggaagctcacttctgcaagctaaaacatttgactaggtctgacttgagagataggatataggcatccctgtgtacttggtgcccgttttacagagagttaagcgaggtattatgggaagcaagcaagcaagaaagcaaaagatagtatttttccattagagatttttgtgcttcaaagaggaaggagcaaaagaaaaaagtctatggatgcagaaaacagaattatatacatactggagtgtgtgtctgtgtgtgtgtgtgtttagggaatttgagggagagagagctgtgtctggatagctgctgaaaatatacagcatcaagtactctgtgatttttattgagtataagcttcagtggaggcgataactgcataagtaccgtagcccatgacagagaagtgggatataaggatctaaaggtggagttgtgatgattaaagtgcaaatcttcctccctttcccaataaataacagtgtaaaacaccattctagacagtaaaggacaaataaattagcttgatgaggactctgtggttggacccacagatatataaagaagaagaagagtgggcgaattctttgctgcatttctgtaactggcaacactatgcttggattttgaaaaaagcaacattcttgacaatttttttttaattctaaaagtgtggtcaaagggattgatctttatgtagactaactttggcaagattgtcatttccaagttcaggaattttaagaatacatgctaccatcccttaccctatcttatattgtagttcatttcatagtaagtttaaaaagcttagtttccaggtctgtttggccatctccccagtctgaaggtagaaagaagagaacacactgcccctcatcttagctaattcctatttatttctcaggtttcacttatcgataattcttttgtgatcatttcatcttcccctcattagatcacattgcctcattggatgctttcataccaacctgcacttttttcatttttcgacttaccaaagcttgttattgtacatttttgtaattgtttcttttgtgtctgtcaccagatagcttacatattttgctccttttattctatctaaaataatcctattgtgtttggggtggaaatttttccatgtaaaatctacatttcctagtctcctgtgcatttatggctggccatgtgacataattctgactgaccattaagatgtaggtaaaatacatacagttagtcttcaagggatgttctttagaatagcaagaaatacagctgacttgggtagcttttgcctatcatcctgtttctgttcctactttgggcacagtcacaatattggaagaggagaagcagctactttgtaaccatgaggcagcaggcatgagatgacagccacacactatgctgaggctgagcagaaagacagatgtgaaatagactccctattgacatcacagagccaccatactcattggggctttattttcacacaagaaaaataatcactctgctgattttcattgccattttcttttcagagtttctcttacttgcagtggcacagaaagataagcaaagaaggaacgataggaaaactattttacctagagaagagggttgcattccattggattctataacttggctttggacagtaatgcagggaaaattatacaccttcctgggaactcatgattggagaagtcagtagaagagaagaaagttgagagtgaggccaagacacccctagagagaaatgagagagttgctccttgaatgagttaagtcaaaggaaatggaaggaaaaatatgaggtctgtgggctatctaatgctcctcttatgaagtgtggttgagttggaggagagaggctcaatgtggttagcgtacttattatgtgcattaagcagactagagtgcattaaatgtggagtgaattgattttatacaactatcctcagctgtcttttttaaaaaaaataatgactaatgcattcctgcaaatgtgtttctccggaaaagcttttggggaagggagattattttacctaatcccttttcatctatgttatagaatatttagtgtgcttatttgaccttgagagttatacctcttgtcattaggcaaaggaaggttagctaaaggaaaaaaaaattacatggagcactatccttataactttaggttaaaataatttttccatacttaaatatacagagtacattgccaacaaatggaaatctctgcttttggaaggtgaggtatataggccaaagtacaactaaagttagagaacgcctctctctctcctctcccgactccatttcttcctcaggagagattttcccaaatgacgccagctatggacctcagcctgtccacacaggggaaaagctcacctttccaatgaagcaagccaaagcctctattggaagcaaaccctggccttccttctccagagcttgcatcttgacctgagctttacactgttcctttctttccccattgactaggctgttgtgtgccttagaataggcttgctccatatactgctactatttatatcctcctgcttcatgctgattgacctagctttgggctctttacttgccctgatcttggatagtttgtgtacgcttccttactggcttatcttgtggattctgatccatttcctgctctcacttctagtaccttctcaagcaatgactactaacactctgcctctgcttccttggttctttggctgggcccttgtaactcattgaattattttgcagggctgaatgcagagaagcagaagaggatgggactgttcaggacatttatatgagtatgtaacatgaacatattccagccacaaaatagaagctagactttctgcccatggctgtgtttataacatcctctctcagcaagtcaggaactggttattccctggaatctgattttatgagtaagctcagtttcagatgtccacatttgaagtacttaactatcaattctttttttaaaacattttttatgtcaaagggacatcaaacacagcccttcatgaaagagctcgttcaggcccaataaatggtcagtgaagggtcaagagtatattgtccaaaaataagggagaggtttatgatataaaactattaatttctcctctattttttgtaatttgtctcctattgtaaatgcttttattgtccctagggaataggaactaaagactatatggttttctgttgatagttcaaattcaaatcttggggtccttattctctctcaaaagatggactatatgaggctctatgtgggaggattagcagtatacattcacagcaccttgattctctagactgaaaggagctcaagggttattttcaacatttaacccaggttctagcttggtaactggagcatggtatgtatttgagaagtaattattgaattgggtcctggctatctggatagctagctgagtgacattgtcctagtcttttcatttccatttaatagatgagaaatatgaggctcaatatcacctcttccacaaggagttttgtaactaagataatgagagcaattttttataaattaaaaagagaaccatacaaactataccactttgcattagttttttagggctgctgtaacaaagaaccacaaactacagtgggaaaaaaaaaaacaaccaggaacttaatctctcacagctctctagtctagaagtctaagataaaggtgttgacaaggtcatgctttctctgaagaatcgagggaaaatctgtatcatgcctttctctcagcttctgtgtttaccagctatccttggtgttccttggcttgcagtcacattaactccaaactctgcctccatattccatgttcacagggtgttcttccctctgtgtgtgtctgtctctgtgtacagatttccccttctttttttttgtttttttgttttttttgtttttgagacagacttttgctctttggcccaggctgtagtgcagtggtgcgatctcggctcactgcaacctccacccccagggttcaagagattctcctgcctcagtctcccaagtagctgggattataggtgcccactaccacacccaggtaatttttgtatttttaatagagatgggggtttcaccatgttggccgggctggtctcgaactcctgacctcaggtgatctgcccgccttggcctcccaaagtgctaggattacaggtgtgagtcaccattcccggtccagatttccccttgttataaagagaccagtcattttggattagagcccaccctaatgactcatcttaatttgattacatctgcaaagaccctattttcaaataatgtcacaatcacaggtaccacaggttaggacttcaacatatctttttgggagatgcaattcaactcataacacatgcacgaatctcttacacaaagtcctttggccagaggtgttttggaattcagatgttttcagatagtagaaaggcagtacagtgcatataccatctattaagtattactcccaccacgttgtagagtaacaccatgtgttcaaacactgtattattttcacagaaaatacaattatattaacactaagtgagataaataaagaactctgatatgatcttatccattcagaacccactttactgccaaatgagtttcaattttttgtttagagatttttttttttttttggataacagaatggcagataatgagtttggggccaatatcaaatactgacttggataccattcctctgaaaatctttgtctcataatatctttcttcctcagccccgttgtcattatcctagttctggtcctcattaattcacagctaaaccaccataccaggttcctaattgtctccggctttcacatattcataactttctaaccagtgtctctctctctctctccctctctctcctctcttcaatcctgtttacactctgttgctagattaatctttctcttatacagctctgactaagccattcccctggttagtaccttctgttactcccaatataaaagagtttggcgtaaagaaatgccaaactcctcaatagagctttcgtgcttctacaacctggaccctcttcttccctgcaggttccctgggtgagaactcaactggactgctcacttttttttttttaatcacttgccccataatgtcctccctgtatgtgtgcctttcctctctgctttgaagatatggaccccaagccgtgacttctaaatatccaggctctacccatctatcaaggccaagttcaaatgatacctgcaggaagctgcctttggccctttcagttggatacaacctcatttcctccccttgccccataataatgatgacgataacatttttaagcactcactatgtgtcaggaatgttcacagtgctttgcatgtattaattagtttaatcctcacgacaatctgtgagataagtcctgtttgcagccttgttttatgtatatagaaactgaggttcagagaaaataagtaactttcccaaagtcacagagttgttagtggcagatctggaatttgaacacgtgacatctagctccagagcttatgtttaaccaccgtaccctttattgtactcttattgtatcatttatcactctctcttgggttatgaatatcaacatctatctcctgatctaggtgctaactctttaatttaaaaagttatctggatttttatatttgtatcccccataaccttcagcacagtactttgcacatagcaagaatttatttactgtttaaggtgatgcaacctacagtaatatatggattaaccctgcaatcttaatggcttaacacagtgaagtttatttcttgttcacacaaccagtcattgtaggtgtttctggttaggtggctcttctcccagggaaaatgtaaaggcctggttttctttcacctcatgactctgttgttttcatcacctggcttccaggactgccccagggttgtctttcttcctgccagtaggagaatggatagtgtatgaagaactgcgaaagggaagttttcatgagccaggcctggaaatggtgcacattactctactggccagagctcagtcacctggccacatggaactgcaggggaggctgaaagatgtaattgagttacatatgtatgtgtccaggaggaaaaggaaattgcacgagaacaaataaatgttgagtgaatgcatgctatagagagccctgcagtatgcatccattgtagggtttcaattaattaatcaaccccctttgagtagagtctttctaccattcaaaaaaattccccaaaccaaatcatcatgcaggccatgattctctaccttgtccttaggatattgggaaaatttttgtctaaagtcttggcaaaatctggttataataccctatttctattatttcccccacaaacatgtatgttaatcagctttcaaatctgtattgaaataaaatggttttacagaggtctgtcctagtgagctgtgctattcaagaatcctgtgatctcatctgccttctcatagctgactataagagattatttgtctattaaattaaaaattgcatgcagatagatatacccacgagtcaatgcatcagtttatttaaaatcaaattgcccaggagtggagaggtattttgctgagtctgttttttctagcctcaaacctatataaaaaataactgaaaataataacatatttacctgtttaacatacttcttttttctttcccaaatgagaagtgttagagcagtgttcaagtgatatataaaaacacttctgtgctttcttctctctacatcctgtaaggctgtgaatttaaggggactgaacagttctcttactttaaaaaaaaattattggtttacatggctgacaaatcgaattgataattatattcatcaaatattaacaaaatattcatttggggcttaaataactcaatatcatttaaaggaacaaggttcaaacatgaaataagcataacagtaatttaaaaattattattccagttctattcagttcttcataacctatgcaagcacaggttctattaggaaaagcctcccctgcctgcttctatctgctcccaaatgtgttttttaaaaatccattggcccttgggaagattattttctcaacacttaaaatactcatctagtgttaaattttgaccctggaaatttatgcacagctagttcctgggatattactagatcactagtcagaagaagtcccgttttcacatcaagcatataggcagatattttccttggagcattttggagccttaagtcttttgagcttatcaacttgctggtgacatgttggactgtgtcccagaacaacaccatgttactggttgagaccttcagcatagctgaaagagcacagagtgagagctggaaggcttgggtgacagcctctgctctggtgctaagctgtgctctgctgtgtcaccatgggcaagtaagactttctctgggcctcagtttcttcctccttgcatatcaaaaggttggattggaaaatccccaggatcccctcccatagatcatgagttctcagccagaaatgtgtcattcgtttgtgtccccagaacttggtatgatgcctaatcaatagttggtacagtatgtatgtttaaatgaaaaaaattcaatgacataatacatataaagcactttagaaactgtctggtcagtataagcactgggaaactttttgctagtatttcaactaaaaggccatctgcatttgtgagaactgctgacagcatgcacaccttcagcccatgtgctagcacaggaaagttgctgagttcactcttccttgagagttaggcccactctttccctgctaaaagacacacatcagagattttcagtactagggtttctctcagaaatggacatgaagattaaatacttctgcacttctcttctcccttgccaggagcagctcactcctaggtcattccatgttaaatcagcatgaagctgggctgggacatgatgcacccagccttctcagttatgctcaagacatcaccagcatcattatgtctctgaaagcccagatctaggtatctccatgctcatctctcttcggatgcaggctctcccctgtgctgatgcctctaatcacagaatccttcacagtgtctcccatctgaagcagagttgggaaccaacaatgtatttcttctaccgccaatttagtcttggctttcggtagggtatttatctcaaacttcttataaaaaacaaaccagagtcaagaaggagccctggggatttgtatgcagctggctagatcactctgtctcacgtcccccaatcctccctctttccccctaccacactcagtcttgctgccactatcgatgtgacttgaaaccatcagttcaaatctcatcttgtttttttatccctgtctgcactatgctatggactgaatgtttgtgttgtcctgaaattcagatattgaattcctaactctcaaggttatggaattaagaattgtgtcctttgtcaggtgactatgtcataaagttggagccctcatgtatgggattagtgcccttacaaaagagaacccagaaagctccctcatcccttctaccatatgaggttacagtgaaaagatggctaactaggaagcagaaagaagacactcaccagactcccatctgccaatgccttgatcgtatacttttcagcctccagaactttgagaaataaatttctattgtttataggacacccagtctatggcattctcttatagcagcctgaacagactaagacacaccaggagacccaagaagttcagacccctcagtcatccctcatctcctggactcaaattcccacgcatggcacatgacatcttatcaatgagtttgttcctgctcactggatttttaatttccaacccttccccatagtgcccatctgctttgcttttctaagttaccattgcttgtaatttctttgattatttaccatttcctaccactagaatataaccttcatgaagccatgggctttttcctatttactgatggtgtcttcatgcaaagaacagtgcctggcacttagtagtcacttgaaaggcaatggttggatgactctttgccagtaatggacacggggcacttggagaaatgttctcaggtctttatgctctctcatccacctccaggaactctgctccatttttttttaagcaataactccctttaagtttctgctcagggtctttaagcttagtttgcctttcccatcctagtcataactacagtgatcatcttctttaggttcctgcctcagcctgccatttcttagttaagcagttgctaaagagatgcccattcgctttgttccttgaatctttattgggagagtggcagtggtgaagaaggtagggctgggagactacttttttttctaaagtcaggtaactgcagtcgaaccacaaagcttctgaagttctttttacttctcctttctttgtactaattcagacagatatgaacaccatttggcaatattccctgccattttcttttgccttccatttccatttcttttatctataatctgtactctagctaagctctgaaagattgtctttttttagttctcaccatgaaggttgaattatagctctaatttgtttattgcctgcaatacatttatgatacgtgcatatgtgtgtgtctgtgcatttatgaatgtgtcatgcatatatatgtacacatacatactcatgcatgtacacacccacatattcaggcacttatataccattgtacagatgagaaaactgaagttcggagaagtaaaataatttctccaaggtcactcagagagtgaagtttagtttctttttagtccattttaacttactccacttaaagccactcttgaaagagttgccaaatcttgtcaaattttgttaatttaaaactttcactatgacacattttaagcatatagacagaaagagagaataatatcaagaaaatccatgtattatcctatacttgttttcacattttagaaaggaatgatgccttacagagaagtagctgttgtatacttcttcctgatcgcattttccctaccccctccccagaggtaacattttcatgattttaaaaaataattcacatgcttgcttttacattatttctatatacaaatggatttatacaaatatatacttagttttagcttttaagcttttaagtaatatctgttttgcagcagttgctttttgttaacattatgtttttgagttttttccatgttgatgggagtgactcccttttgcattcattttaattgctcacagtagtccattgtatgaatattccgcaatttatttacctggtctcttgccaatatataattattctttttccacatttttatttaaaaaacaataatgtcactgtctgcatcttattctgcctctctgcaacatttgccataattgaccatcttttattgtacaatttttttttctcttggctctataacctcaagagtcttggtttttcccccttctcctctggctacttcttggttttcattaccttctttcttctgtgtaacctaaaaatgtcaaaattccccactcttggtcttgaatccttttcccttatctctctttccatttttttttttcctggaagatctcacttatttatgtgactttaaatataggttgatactcttcaaagtggtgtctcctgtccatacctcccctctaagctccagactcatgaatcatgacaattgcctacttgactcctcctcttaggtatctcagaggccattcaaggtcaaacttaggacatctaagaaaaaaaaaaggaactcctgatttttctgtgtaaacctgtaataaagagcttttaaaatggccctcaacaagctggcctcctagtattcacattttgtcacatctttgtgtaatctcctcccttgtgtacagactggactcactgaattgcttctaatgaatctatggcaaaaatgatgggatgccacttccaagattaggttacaaaagactgacttccatcttgtttgcattctctgtggctttccttacttgttcactctgaggaacccatttgtcatgttctgaactgcctgatggagagaaccacatatcaaggaactgagaacagccttgggccaacaaccatttgattgttaaaggactggactctgccaatgactacaggagtgtgaacttggaagtggttcctgccacagttaagcctgatgactgcaactactgctgacacctcaattgcactcttgtgagaaaccctgagccagagagggtgcagctaaaccacactggggcacctgacccacggaaataatgacataataaatgtttgttattttaagctgctcattttgggggtaatttgttacatagtattagataactaatataactaatacaagtcctattcatctctcagtggtctacatatcaataaacaattcacttggatattcagattataaagtctttcttgactcatgcctctttcttatcctccacagcaacccatttgctagtcctgtagcttctatctccgttggcatacactaggccaagccaccatcatctcttgccttgagagagaaataagaggtctttagacagaatccttagggaatgttaaggttgttttatcctcctgtcttcttttccttatcaatttatttgtttacttatttaatacatttttatgtatcactgaggtccttttttaagtactagggatggagataaaaacttaacattgttcctgcatcatggattttgcaataaaataagggagatataaattaatttaaccgagaaatgtgaaaagtctctgaaaaggagataattggttctatgagaagaagatcatattatttcatattgctacccaatatactaatgatttctcaaggaaatgatattgaggatctttcttgatcccaacttgtttaaggcataattttcaagcactgtgcagaaagtggtggttgataaagctatgcatgtgccattgtattctatcctttaattgttctctttccttccttaattaccctccccatgtatgaatcactaggagtgaagtcttaaataccagcaactgtgtctgggcattctgcccttcaccatcaatgagttggtcaagcaataattatcaagattgcattatacctaaggagggaaaaaaaaacattaattcgtatttttcttgtaatatataatgggtgatatatatatttcatgtcataaatcatggcttaatacaagcgtgtaatggtgtaggatttctctttaactgatcacgtcatgtttttagaatcatgaaatctcttagattgaaatggtgacttttactggtttttgtgttcactctcccatatagtataggaatttgctctatagccttcataactggtgattttccaacttctgcataatcacttctagtgattgtcaactcattatctcacaaggcagcttatttgattgttaaaaagatgaaattgttgtaacttcttatatcacttagagttctgcttccttttgacttatatctgttcaacctgtttacttgcaaaaacgaagtaatctaatctagggctcattgttactctgaaaattcttatcaaaaggcttaaactccttatgactaaggctttttagatggcttattacttgtaggtcttcaaagttaattcagtttgttctctcatcagtccaatgtattctttatctatagctagagacaatcttcaaatcttgaattgtgagaaactataatttcctcaaccacataaatatttgatgccatcatgtgatgtgagtgagtaatctgtgtgaggaaaactaaaatcagcctgaaacaatttcttcctgttacattgagtgtgacagagtgatcagcaataactgttcagggaagtcaatactcattcttcagcctttgcttcctgaaaataaatttgctgaggtataaataaaataagcaacaatagtcctgatgcaaaaaaaaaatcaaataaaaatatttcagtccttgattcttttaaattggacttcataatgcagttattgacatcgaatgaaatattttaaactaaattgttttcctagtcaaaaggaatagtaaaactaatatctgggttaggttacttgtatagatgaaattactcctgagaaatggccagtgtaatcttaaatataaagaaatcatttgcttataaaccactgaaaataaaccattttctattgtctggtgtttaaatagtgctcatatctttgaagttcctataagatggaagaagcaagtttattaaataagtcactagtcttcttctgttgccaaccattgaattttataacccaacataaaggatgcgttcgttttcaattgctgcataacaaattgccacagaattagtggcttaaaaaacatgcagtttatatgggccaggagtccatgtgtggcttaactacgttctctgctcagcacgtcacaagcttgaaagcaagatgtcagccaggctgagtccactacgaagctcatgaggtttttggcagaattgagtcttttgcacttataggactgaagtccccacttttcttgttggtggccagctgcttcttcaaaaccagcaggagaatctctctaatctctaggcattcttttgttgttgttaatgtgtggggattgtttgtttgtttgaatagactttattttttagagcattcttaggttcacagcaagactgggaggaagttatagagatttctccatatactccctagccccacacatgcatagccttcgccattatcagcatctcacactagagtggtacatttgttacaattcatgaacctacattgctacatcattatcacccaaagcctatgttttatattagggttcattctcggtgttgtacattttatgggttaagacaagtgtgtaataacatgtgtctaccaatatagtatcataaagagaagtttcactgccctaaaaatcctctgtgttctacgtattcatctcttatttccccccaactcctgagaaccactgatctttttactatctgcatagttttgacttccacaatgtcatatagttggaatcatgcagtatatagccttctcagattggcttctttcacttagtaatatgtatttaagttttctccatgtcttttcatggcttgatagcccactgctttttagtgatgaataatattccattgtctgaatgtaccacagtttatacatttatctactaaaggatgtcttggttgcatccaagttttggcaattatgaataaagctgctgtaaacatccatgtgcaagtttttgtgtggacataggttctcaactcctttgggaaagtaccaaagagtgtaactgtttgattgtatggtaagagtatgtttagtttcataagaaactgctaaactgtcttccaaagtggctgtaccattttgcattcccactagcaatgagtaggagttcttgttgctacacgaccttgctaacatttgttgttgataatgttctggattttggtcagtctaataggtgtgtggtggtatttagttgttttaatttgcatttccctggtgacatgatgtggaatatcttttcatatgcttatttgccatctgtatatcttctttgttgaagtgtctgtgaatttctttggcccattttaaaaattgggttacttatttaattattgagtttttggtatatttcggatagcagtcctttatcagatgtatctcttgcaaatattttctaccagtcagtggcatatcttttcattctgttgacagtgtcttttgcagagcagatatttttaattttaatgaagtccagcttatcagttctttctttcatggatcatgcctttagtgttgtatctaagaagtcattgttaagcccaaagttatctagattttctcccatgttatcttccaggggttttatagttttgcattttacatttacgtctgtgatccatttcgagttaatttttttgaagggtgtaaagtctgtgtctccattactttttttctttttgcataaactctgttttaaagggatcacctctttaggtcatgctcactcagccaatatcccgtttgattaaattaatgtcaactaattaggggctttgattatatctacaaaaatgccttcatccctgccatttaatataacctaatcatgagaatgactccaccatcataaaaacaggccatgtttacacttaagggaggggattacatagggcatatataccaagggggtgagaatcttggagaccttccaattcaacataacacattctgtatactcatttctggtcctaacatttctgagcctcacatttatcatctgtcaaatgagaattattgtagatcaaatgagaattgttacatatattaggaccccacccctaacagcaccactgtgtttttacctttatgctattgtggtaacgctaaaaaccagtctaacttatagaatcataagaaactttccagacctcatgaggcacactggcatcctggtaggagaatgctatgtcttctagatcatctcaaagcaaaaggttttctagaaaagttagcatctacattgcaacatcttttgttgttcccttccagttcagcaccactctattagcattaacaccccacagtaaagagaaaggacactcacagtcaagatgatggagtaaacttgcaaatgagacatccccaggtagacctgttggtacttggggtcctcttctaatagcttttttttgtgggggggaggtcccgatgctggtcatcaacttggaaaccctcatcttgagctattcggagaggaccttatttcttggcaactgaaatttctgaaaatacagcattaggtaacacagcagacaacaaaaacaatatattctctatgggcaatctgggaatggcaacaaaccacaggcatctaacaatttatttgttacgagaggaacctgaaccatgctaagacaaatggacatcaacattgttagagaagacactgtccattagcaagcactagcagggagaaaaagaaaatgaagcctaaaagcaagttggaggtagccatctacttactagagataaagacagaatattagctaaaacaaagcaataggatgaggaataaaggctatgtttttgtggtagacatttccctcttgagctgagtatctaatacccctcaccccaaacccaactgagcatctccttttctaaggtactctaacagattccaataatgcctccacaggtgggtttgggtgaggatgattgataatgtttataaaatatctaccataatgtctgtcaggtaatgaacacatgtaacaaatgctaactagcagtgttcttagaaagagtagtatgagtagtatacagtgcactttctctagagggaaaaactataatgtaacaacaccaatgttcacagtaatttatgagaggattgggtagaggaggagtaaatacagaacagcatatttcaacgtgcttggtcaattttcagtaacaggaacagtcatgttttccccaggagggcagtcttttggtagaaactgtagtgaatacaagcatgcatcatctttgtcaatgtgatgaatgctattcagaaaaaagtgttatttataagaatcttccaaaataaattctacaagagatatttggcaggttaaaaacaaacttggaggaataaaagaatgtccagaacaaaagctcaaaacattagagacaatgttcatggctgtgaacttcccattgcaaggtggaaatgataagtatagatgatgaactgggaggataaaagctgaggagtcaaggtttttttctattactctaggtcagtgattctcaaccagggatgaatttgtcacttaggaggcatttagcagtgtttggagatgttttctcgttgtcacagcttaggggaagagagatggtgctactggcatctagtgggtggaggccagtgatacttgttaaacgtgctacaatgtccaggacagcttccacaacaaggggctggtctggaatttgaactgtaagagcaactggattttgttgaatgcttgtgtacaggagacttacgtaatcaggtgtgtattttagaaagctccctctgctttctgaaacagggccagaatggagtcagagggacttcttaagagataagttgtcttccatcagggcaagggatacctgtggtctggaccaaaactatggcagtgggaggtgacaagatatggacacagttgagaaagcttaagaagtggaatcagcagaatttgatgtttctttggatgtggtggatgaaggcatgggagaattctggagctaaccccaggttttggtttggtggcatcatccactaagacaggaaaacaggaggattttgatgggaacgaaaaaatatatacaaaataaacatgcatgcttggatattcaagtagtgtgatccaacaggcaggggagaatctgaaaatgcaagcaagtactggggtggagatatgaacttaagaatcatcatcatacagtacttgaagccatagaagttgaaactgaaaagataactaaccaagagggaggtggaagagctccagcttttcaaagataggcagagaagaggagtttgccaagggaatggagaaagaactcctacgcttgtacaggaacattgcaagatgtgtttcctagagtgaatgtttgaaaggagtgagtccttggcagtatttaatgtataaagaagttagctggaaatatcctttgatttagcaagaaagtaatcattgatgataacaaggagaatagtttcagtggaatcatttgcccttaaaggagaggagatcaataggaaaactactagagaggactatgggtccaagagaggaaattttaaattaatgttaggaactggaacatgtttgaatgctgaaagtcgataccaaacgagagtggaaaattggactgaaatggtttctacagcacaaatggagagactagccttagaaggaagaaagaacaccttctggcataagcaaaacgatgatggaagttgctggtaaatttatgaatctgtcagtggtaaataaataagtacttaacatgataacttcttttttctctaagaagtctaagataaagtcatctgaaaataagtacttgcctgagaacttcttgcttctctgggaagcctaagataaattcatctaagataattctcatttgacagatgataaatgtgaggctcggaaatgtgtaggtaggaattttgagaagctcaaagaaaggttgaaatagttgctgaaattgggaaagagatattaccagaaatacacaaaaattactagtcaaaggaatgccaaagaccagttaaggctgactaccttcattgtggtgcaaccactccattctgttttggattctctacagtggttgtcagcatcttggtgtaagtggtgtcaatttagcgagttgagtttgttagggttaagattaggctaagtgaatttgagaggggattgaagaaagtgtattatggaaataaatgtccataaaactaaattaagtggagaaagaaggaatgacaagaggtgagggtgatggatctggagaaaatagtagagtgatcaaggaaacaggaagtccctccgaggccaaagaatagctaactgaaagaactagaggcagaagaagttgcggtccaaggagaattatttgagtttaagatttcagacacagagattttcaggtgaaggcaatataaaaatgtggccatgggagaaggcagaagtgaagcaaaagtgaaagtaattgcagatgaagtcaggggattgagagacaaagatattgaatgcaatatccaaattaatatgtgctagagaggcaattaatgtggactattacgggataaacatcttcatggaataaaggaagagatttaaaggtaatggcaagcaggtgggaagaggagggttgtactgggtgtcatacacagaggaggtattttagtttattttgttttatcttattttattttattttattttgagacggagtttcactcttattacccaggctggagtgcaatggcacaatctcggctcactgcaacctctgcctcccgggttcaagcaattctcccacctcagcctcccgagtagctgggattacaggcatgtgccaccacacccagctaattttgtatttttagtagagacgggatttcttcatattggtcaggctggtctcgaactcctgacctcaggtgatccgcccgcctcggcctcccaaagtgctgggattacaggcgtaagccacggcgcctggccagaggaggtattttaagccaagcattttggattgatgatctacagaagtagccctgtggggtgaagaggccgtagatttatttcccaaccatactatttataagatgaggagactatgcagatttcacttgagacatctttgaggaaacatatgggagagaagaaaaaaagtcaaccataatttcatcatcctgagcaatcactgtcaacacatttaagaagactgtcctggagacggggtaagaattggtcagagtgggaagacaactgagacaaaaaggtaatgcagtcttcgttgtagggctgcagtggtcgggatagagagagagagatgattgtaagcaagatcagcattcagatagttaattttcctacctcaaatgtcatttcctaaacattatctgtattataagggctgcaagttttttcagtgctccttttgcttatccttcattatgagccccaatatatctagctattgtcatctgctgcttccttcatctgggagttggattacctgaaaagattttcatctggtacatggttgttttatataacgcttctgctccagtcactagctttaccattgcttgtttcagcacttgggagtcgagcaggaactatgatacagctagaccattcgtttccagtcttttcggttttttttactgggaaggtacactcagccactgtccctgtagtctaaccattcaagaattggattaggtgaatacataaaacagcatgtaggcagtccttgaagggagttatactttggttaactgatttattcctttgccagaaccattgtgtgtatgcatggccatgcgtatgtgtgcgtgtatacacacaactgataaaagcaaccagcgtttgagtgtttcctacagccttgtgtgtaggcagctctagcatcactgtaaaaggtatgcggtgggctgacgactcaagttggcagctgttcctcttaaaactgcttcactccatgaagtcagcagagaaagcagtcagtctcttgaacagtttatgcctggttcttggcatcattaaaattctgttcttttcagtgttgcttcatttgcacaatcaggatgctccgttttcagacattcaaagtgttgaaaatttttttaataaatagattttcattggcatcaagtccaagttgagtgattctcaatgtaggaaataacagtataatttttggagtatgtattttggagagtctttccccctctttggctaacctttgtaagtgttatatggtttccaaagctctttcatgtatgatgatttattgcttatacaacaccacaaagttggtaccgtgagctctaattcaagatcagtaaatggattttcagaagggaaaagtgaacaatcaaaggctggtttcggtgatggagtcaagctaaaaacactggttgtcttagactctagggatctttctattataacatggtaactttgagcaagtgaggtctctattgtattaacagtttgtattgtaataaagtgtgttcaactttttctcaagctgtatttcaaggttaacactttataaatggaactaaatcattggagcttaggccaggggctggaagtttatttattgatctagtctggcctcttgggtttcttgatatttggtaaaatggtacatttctcagtacattggaaaggcattttatttcctctagaatgaagagcactgctcttgaattttaaagcgaggtccaacagagatcatgggcccaaagcacaaaccacaagcctcacgttgctacaggaaaaaaatcataggtaatttctgaagagcctttctatcaacttctacttaaatctgtgccttgaaatgataggcacatatgatagcttctggaagtatgcatagtaattaaatgtatcattctattccaaactatactgaatgaagttactaatgattaaatgtgtttattttcaaagatattatactttacaatgtcataatatttgaatgttaaaatatatgtaatagaagtaaattatatgctatcaaagtactttacatggatcatttattaatcacaaaggataatagatccctttaccatggaaagatggaaagatctgacaaataccacctaaaccatattacccaagttaacatctccaataatagaaccaatgaatatcaagtgcttcctggtgtgatgtagcttgaaggacacaatatcaaatctgtgatataccagcctaaaatgcttaatcattatctaatcatgagaaacatcagaccaaccaagattgagagacattctacaacaacactggtgacactcttcaaaatgacaatgtcataaaagacaaaggcagaggcatgagaaataaatgcaataacttacatctggatcagaaaaacaaaattgttataaaaaatattattaggaaaatttgcaagataaaaattgaacaagaaaaaaagtggtatctttgagaacaagtgagaacattttgacatttctttagaaataatatgaattgatttgaaaattattttgaaaataatttagagctaagaaagtaatggcttgcggagaaccctttgagtttgcttcattatttaaaaattcaataaaataagtaattattcctattttaagtgaaacagtttattataaaaccttatttcagctcaggcaatttctaatctatgcagattaatttcacttgcatagaattttgagatttgggtagactttatttcaatttgtttattttaatctttaagagagtcattttgttatttatgcatgatcccttttaagaagtgtttatttgtttactgatttggaagtattattatgtgcaaagattctaaaacagccatccagatgccattgacacggtaatgtggggattttcattaatttatacgatttatctgttttcatatttcaccatttactattccacctccacacctggaagagtatctgatcttggctaagtatctttgtgaggatacatttatctgtccatttgttaacataaatatttattgagtagctatgagattgtctagtacctttgccgggtactagaactttacagaaaagctgtatcgtgtctttctcctcatacaggcaatgtattgactcatgaaacttccaggtagttctccaatgttctcagctggatgataggtaaatatttagagtttttagaatgagaacatgaggagacctacttctatacctgtgttttctcatgaggattatatttgtcaataatctttaccctccatttgtacctatttattcatgatgcattatgacaaatgtatatagttatacagctgccaccacagttaagatatagaacatttcgatcataccaaaaagtttctcctgctcctttatacttatctttacttcccatcacccttggcccttgatctgatttttgttcttgtgagtttgcattttccacggaattatataaatgaaatcatacagtgtgtggcctttggggtctggcttgtttcacttagcataatgcttttgagtttcaaccattttatttatttatttttattttatttttaatctgttattttaggttcaggggtacatgtgcacatttgttatacaggtaaactcgtatcatgggggtttggtgtacagattcttttatcatacagatactaggcctagtacctaatagatactttactgatcctctccctcctcccaccctccaccctcaggtaggccccagtgtcttgctgttctcctcttgcattcatgtgttctcatcatttgactcccacttataagtgagaacatgcggtatttggttttctgttcctgcattattttgctaaggataatggcctccagctccatccacgtccctgcaaaggacatgatcttattcttttctatgatgagtttcagccagtttttgtgtgtatcagtaatttgttcctttttagtgcggaatagtatctcattgtatggatgtactacaatttatttattcattcaccaattgatttggtatttattttccagtttttgactaatagtgaataaatgcattattagcattaatatactagtattttgacatataatttcatttcttttgggtaattagcaaaagtagaatatctgggatggatattaagtggtatgcttaagtttttaagacatgctaaagtcttagcatttagttcctaagtggctgcgtcaccttgtattcccattaacaatgtatgagatttccagttgctccttatccaaactagcacttgatattttcagtcttcttcattttagccattctaagagatgtatagtaatctaacattgtaattttagtttttcatccaaatgtgcttttagcagcttatttgagttgtaatcgttctttatatattctaggtacaaacccttctttagaatgtttttttggaaatattttctcccagttctgtggagtgtctgtgctttctttacagtgtctattgaagaaaaacaatttgatgaagtccaaattactaatttttgttatagtgtgtgctttttatatctatatctaataaatcagtagctaacttaacttctcaaaaatattctcctatgttctcccctagaagatttagtttcagctctgacatttaggtctgtgatcaaaatgtcttcctaggaatttgtctatgtcaactgatgtgcataattgtttggcataaattttttcataatgttttcttataatgcttttaacttccctaggattgatagtgatgtacactcattcctaattttggtaatttgtttcttctatttttttgtcatatggcctagaaatttatcaatttttagtgatttattttttctatttttttttgttttccatttgattgatttcccctttgatctttatggtttccttcctgtttgctttgtctctagtttgttccttttttttctaatttctttctctttttttgagacagggtctcactctgtctcctaggctgcagtgcagtgacatgatcagagtggtgcagtggagtgcagtggcaaggctcactgcagctttgacctctcttgctgaagcgatccccccacctcagcttcccaggtagctgggaccacaggcatgtaccaacaagcctggctatttatttttattattttttatttttgcatttaatttatttatttatttatttttattttttttttgactcctgggctcaagcaatctttccacctcagcttgtgaaagtcatgggattataggtgtaaaccactgtgcacagcccctcttttctaaattcttaaggtgaaaacttattattggtttgagatttttatttttttaatatagatctttagagctataaattatcctttactactttggctacatcaaaggaattttaatatacctgattttgtcttaattcagctcaaatactttctaattttcctttttatttcttctttacctatatggcatttagaaaattattgtttaattttctatttttttgttgttttgctaatttaattccattgttgttggagaacatacattaaaataataatattaaatttattcagatttgttttgtggatcagaatatgatctattctgaggaacatttgtgtatgcttaggaaaaataaacatgtaaggctggatacggtggctcatgcctgtaatcccagcactttgggaggccgaggtgggtggatcacctgaggtagggactcggagaccagcctgaccaacgtggagaaaccccatctctactaaaaatacaaaattagttgggcatggtggcacatgcctgtaattccagctacttgggaggctgaggcaggagaatctcttcaaccagggaggcagaggttgaggtgagctgatatcacaccattgcactccagcctgggcaacaagagcaaaactttgtcaaaaaaaaaaaaaaaaagaaaaaaaaagaaaaaagaatgtattatgttgctattgggtgcagtattccataaatgttaattaggtcaggttggtagatagtgtcgtctaagtcttctacatctttattgatttactgtatagtagttctataagttattgagagtactgaaatctgtaacttgaaatgttgaattgtttatttcttcttttgattctgtcatttttgtctgtatataatttgatgctctatgtctaggtacatacatgtttataactattatgtctccctgacatattgatcctttcattaggaaagttcctcttgtatctcgtaatttttttttttttttgtcttaaaatctgtctttttttctagtggtaatatagccactccagcttctatagttaccatttgtatggtttgtctttttctatcttattactttcaatgtatatatttctcttgtagacatcatatagaagtctactgattttcagccaatctggcaatctctagcctttgattatagattttattccttttattttaatgtcattattgatatagttggatttatgtctgcctttttttttttttttttttttttggagatggagtctcgctctgtcacccaggctggagtgcaatggtgtgatctctgctcactgcaacctcagcctcccaagtagctgggactacaggcacccgccaccatgcccggtggggtttttttgtatttttagtagagacggggtttcacagtgttcgccaggatggtctcaatctgctgatctcgtgatccgcccacctcggcctcccaaagtgctgggattacaggcgtgagccaccgcacctggcttatgtctgctattttatttgctttctgcatctctttttgttgttgttgttgttcctctattgctcctttactgctttcttttgtattaaatatgttttggtgctttgtttcaattctattattaaaaaaaatttccccattgttttcttagtggttactctagggattactatacgcatcttaaatgatcacattctacttcaaattaatactgacttaattccagcaaaatatagcaactttccttcaatacagctttacctttcccccttcccttttgtgttactattgtcttataaattacatatgtgttataaacttagcaatatagtgttataattgttgctttatacaatatatttttaaagacattaagagaagaaaagataaaatatctttgagtcttttatatatacacatatatggttcagtgttcctactttcttcctatgaatttgacttactgtctggtatcactcctttcagcctgaaagattcattcagtatttcttttaaggtagatctagcaacagattctgtaagtctctctttatctcacagtaatgttatttcatcttcatttataaaggatagttttgctggacagaattcttggctaacttttttcttttagcactttgaatatgtcatatacttccttttgccctccagatttctaatttgaagtcagctgttgtattgttgtgcccgtgtatatcatgagtcatttttttttttctgctttcaagattttctctttgtctttggcttttagcagtttgactatcatctgtatacatgtagatctctgtgtttatcttacttggggctgattgagcttcttggatctataaattaaggtttttcatctaacttgggaagtttaccatcacagtttcttcctttttttctcttcctttatcctctcctcccttctcaaattcccatggaaatacgttggtattcttgatggagtcccatgcatctgggaaacttgattatttttctttttctattttttaaattggataatttccattgatatatcttaagttctttgattcgtctgtgttctcaaatcttctgttgaattaatcttgtgaattttgcattttgcttattggacttttctcctctagaatttcagtttggatgactgggtgtatggctcaggggtagagaatttgactagaatttcaatttggttctttagtatctatttcttcagtgatattccttatttgttgagtcattgtcataaattttccttttaatcttttaaatatggtttcctttagcttttgatcatatttgtaatagctactttgaagtctttgtctgctaactccaacatctacactcatttaaagtcattttcttttgacagctttttttttttttcccagagtgtgggaaacactttcctattcttttgcatgtctcataagtctttgttgaatgctggacattttaggtatttatgttgtagcaattttggattcttgaggttttatttttgtttgtttatatattttttcattaacttgcttagactatagaatctggctctcctgtaatgtgtagtatgtggtcattgttctcttcgttcaatttttttcctaatttttatttttatcctgcattatttatatcctgcctgtgctcaatctgtatagcttagcactcaggcaataattgggtagaggttttgcttagacacttcaagctgtctgactctcacactctgtcagtgaatttgtgtgtgggttgagagcacacttaaaattcaagcagttttacgtctacctcggcttttactctccactgggccctttcatttcatcctgccaatacacacattttcctagtcagtgaaagatgtgtggagagcttttcttgtacttctaaggtgatatcatttccagaaccatgtccttgtgaaatttgtggttggcttctcacttgccctagaacctaaggctagcaagaccgtgggtttctccctttcgttttatactgagtttgctacttttactgacaactttgctgagcatgagttttctgctctgcttcagatcaagttagccctctttggcagtgaagctgctgggttttagtctagacatatacccttacaattaccattctcatctactgaaccagacagtggggatgagagcagccccaggcaagaaggtcacaaactctcatagttcttgcctgaagttctgggagcttttcttggataagtgcttttctgtttattgtttgcctttggtcactttttggagctctgaaatggttgtttgtgaccattttttcctagctttatatatgtttgttggtggcagaatttgccaaaatcttcactctgtcatacattgaaagccctatgaaccgtaaggattttaaaataaatatgtatgtatgtatgacttttttgtggtaaacgaaatgatatccagctaatttagtgagctaatgatgaaaacctataaatcaaacaataagataattgaaattgataaagatttaaattagaaagtaaattcaatatcaagtttcaggagaagaaacgtttaagaagcttctgaaaaaaaactatctcaggtgctctcttatgaggtttgctctaaagggtacaggcatcatacactatatgaccatgcataatcagaatttaattatgttttaaaaatcagagctagaagagaccttaggtgttctctcatccagtggtccccaaatactgggctgtagattattggggcctttgggacctgtgaaaatgttttctctaatctatagcacaattaaaaaaaagtaacaatttaacatgcttttcataaagctaaatctgtttaatttaaaggactacattttagccaacttaacattttcttcctacatcttgatattaaaatattccttctattctgtgaaatgctggtaatagaagaatatacatatcatagtcttatttagcaaaattatttttttttcactgcatgttattctctagcattttgaaaattcactgcagcttctgataaattacatgcttttctcaattttactgtttttttagtgtaaaaaatatcatttttatgataaaatatagtttattcttcatgagaaaggctttttatataactaacaggaaaatgaattactgctttcccttttgtgtaatttggctatttgaattaattttttaccagttttctgaatgataaaaccttgtttgggctggggaaaaattcatccatagctcttaaatctttctgtcttaaatcaatttagcaataatttttataatgagcaatctagaataatgttcatataattttttatgatcttatcacaaaacttgtattctaaagatccagagctttgtatgcatatgcaagggatttatataccatgtcatttttcttatattgtatgataagcaaccagctcgttcttaactctgtcagttcatcctgtgtcctggaaatacatgagctctgctctgttggagtcacatttattcattaataatctttaaatgagtgatttgctggtgtcagcttcattggtccagatataagagataggaaggtgagtatggaacactcaagcaagagagaaagcaaaagtttccagtgaactgataagtgctaccagggaggatgtgcaaagggtcaagtaagttcggatgacagaaacattaacattggacagttcaagggaggcatctgtgaggaggtgaccagtttgagctggattttgaataatgagtgtggttttctatgccactcttctagtgtcagacactaatcaagtcacttaaacatttcaggtcccaactatctaagtcttaggtctaaagttctgctctttcagatcagtgcaggtccgactattttattagatcaataatacatagaaagttatgatctcatgtatcataggctctctgaatttgccttaagaagcacaataagggcttctctttgccagtttcctgagaaaatgctatggaaatgaaagtattctttttaattagcgattattaatctgcttggttataataataatagcaaatacagacatcatttactatgtattagaaaatgtgctaaactagggattggcaaacttttgcctgtgggccaaatctgactcattgcttgtttttggatggcccacaatctaacgatgtcttttaacatttttaaatcttgaaaaaggaataagaatatttattgacatttggaaattatataaaattcaaatttgtgtccataaataaatgtttattggaacacaaccatgctcattcatttacatattgtccgtgggttgctttcgtgctaaaatggcagaactgagtagtttcaacagagaccacatggcctacaaagcctgaaattttattatctgtttctttatggaaaaggtttgcaagccccacatgataatgaatcattttgaggcctaagttgaaggtatttctctccaaatatgtttgatgtttacttccgggattactactaatgggaagccatcttttattacttacttcttggggtgggcttttcaaggttgtttttcctttgcatcctggggcattagcaataggtaaccattttaaattattcactcattccttggctttgaggctcctagataatatcaatattgaaatctgaacccaaaacccatatgagagctggtctgtgattttaaattgcagaggaagtcttccattttcccctgcaagagcccatgttgagatggatacattaccctgattttcttggctagtatggggattatttttcccaagtctatccttttgctgaagtgtgtatagttctccaaggatccttagcaagagaaaaaatgaactcagaattgagatttaagaatgggacagaagatgaaaaaaatcactgaacaggtagataaatctaaatattatgactatatgagacaatgtaaatgcccaaattttagaggcaaaaaaagcaagagtaaaataaattaatgagcttcagtgacacgtaaaacagatgggggtattttcagagttaaattgctctaagtttcctgtattctctggaagaagtagacatgtccattagtttgggacaaataagctttaagtcaaaaattattattagggataaagtagaccactacgcaatgaaaaaagctacaaagatacgcacattctaaacctttatgataaagtaagaatataatcttgaatataaaaaggactgtttagagtcacaaggagaaaccaacaaattcatggtgagaagaattaatacactattcttggtaaatgttccatttaccaaaattgaccaagaaataagtctcagcaaattttcaaatattagtatcatctggaccacattcttcaaccatgatgcaataaagttcgaaatcagtaacaaacattgtgtaaggaaaaactcaccacgtttttttctctgctctgataccaccgcagaggtcatcaacacagaagacttctgtgaccaaacatgtgcgtgtttttccccacatgccaagcagctgggtgtcctccaattaaattctgacactatctacctggaggtagtgtcagatccccaccgcttgagggctcattccccaagactgcccccgacccccagacaccagtcgtgagtctgggcttccagaacatctgaccaacctgcatcaagttggggttccctcagccccctctttgggtttgattaatttgctgaagcagctcacagaaatcagggaaacatacttacaggtttgttatgaaagatattacaaaggatacagatgaagacatgtgaagggtgagggatgggggaaggggcatgggaatgtccacaccctccctgggcacaccaccctccagtaaccctcaagtgttcagctatctggaagttctttgaactctgtcctcttgggtttctatagaggcttcattacacaggcatgattgatgaaaccattggctatttgtgatgaacttgaccttcagtctctgttccctccttggaaagtctgaaagtcccaactctctaatcctgccttgatctttcctgtgaccagccccactctgaacctatcaaacaaaagatccacagaactttggatatcccaaaggttttaggagttacaagccaggaactgtgagtgaaaaccaatatataaccatatatatggttatgtataaatatttatacatggttatatatatatatagttgtgtatatatggttatatatatggttatatatgtgtttttatatatgtaattatagatatgtgattatatatgtggctacatatatgtatggttatatatatggtttatatatggttgtatatatcataataccacacatatataaagtacatataacaccacaaacatataagaaaaagtacctgtgaacttgaaaattaaagaagaaattataatagaattataaaatatttgtaattaaacaatgataaaacaatactgtatttcagaacttatgatatgtagctaaagttctcagagaaaaatttataaccctaaattcttagattaataaacacaagaaatccaaaaaaattaaagagcgtatatgtgtgtgtacataccaatttttaaaaataatttcagcttttattttagattcagattcagggagtacatgtgcaggtttgttacctgagtattttgtgtgatactgaggtttgggatgtcagtgatcccatcacccagatagtgagcatagtaccaacagtttttcaacccttacctccctctctccccacttctaatagtctccagttctatttttgccatctttatgttcatgtgtacccgatgtttagctcccacttataagtgagatcatgcagtatttggttgtctgtgcctgtgttagttcacttaggataatggcctccagctgtccatgctgctgcaaaggacatgtttttattcttttttatagctgcatagtattccatgacgtatacgtatgtaccacattttctttatccaatccactgttgacaggcacctaggttgattctatgtctttgctattgttaatagtgcagcaatgaacatgtgagtgcatttgtcttttgagtagaacaatttgttttcttttggatatatacccagtaatgggattgctgggttgaatggtagttctgttttaagttctttgagaaatctccaaacttcttttcacaatggctgcactaatttacattcccaccggtggtgtataagcattccctttgcttcacagcctcaccagcatctgttgttttttgactttttaataatagctgttctggccggtatgatatagtatctcattgtggtttaggttttcatttctctggttattagtgatgtggatctcattttttcatatatttgttggccacttgtttgtcttttttgagaagtgtctgtcatgtcttttgcccacgtttttgttttttgcttgttgcattgtttaagttccttatagattctggatattagaccattgtcagatgcatagtttgcaaatattttctcccattctgtaggttatctgtttattctgctgatagtttcttttgctgtgcagaaagtctttagtttaattaggccccacttttttgtttttgttacaattgcttttgaggacttagtcataaatttttttccaaggctgaaaatgaccagaaaggtgtttccaagtttttcttctaggttcttatagtttgaggtcttatatctaagtctttaatccatcttgagttaatttttgtatatagtaaaaagtatgggtacagtttcattcatctgcatatggctagccagttatgccagcactatttactgaatagggagtcctttctacaccacttatttttgttgactttgttgaagatcagatggcggtaggtgtgtgacattatttctggattctctattttgttccattggtctatgtgtctatttttgtaccagtaccatgctgttttggttactgcagccttatagtatagtttaaagttggataatgtgatgcctcccactttattctttttgcttaggattgctttgtctattcaggctcttttttggttacatatgaattttagaattttttttctaattctgtaaaaaaatgaaattggtagtttaataggaatatcattgaatctgtagatttctttgggcagtatggccattttaacaatattgattttttcaatccattagtgtggaatgtttttccacttgtttgtgtaatctatgatttctttcagcaatgttttgtgattctcctggtagagatgttttacctccttcgttagatgtcttcctaggtattttatttttttgtgtggctgttgtaaatagattgcattcttgatttggctctcagtgtgaatgttattggtgtagaaaaatgctactgatttttgtgcattgattttgaatcctgaaactttactgaagtcgtttatcagttctccaaaccttttggcagagtcttaagggtttcctaggtatagagtcatattatcagcagagagaaatggtttttcttctcttcctatttggatgccttttatttctttatcttgcctgattgctctggctaggacttcacacatactgatgttgaagtcaatgatggactgcctgtatgacggtggtcctataagattataatggagctgaaaaattcctgttgcctagtatttactatactatttactattattttagaatgtattccttctgcttataaaaaagaaagttaatggtaaaaagagccttaggcaaatccttcaggaggtattgcagaagaaggcattgttatcatagaagatgacagcgccatgtatgttgtttcccctgaaaacctgccagtgggacaagttgggaaggtgaaagacaatgatagtgatgattctgacccatcgtaggcttaggctaatgtgtatatttgtgtcttcatttttaataaaaaaagtttaaaaagaaaacagtattaaaatagaaaaaagtttatagaataagaatataacaagaaaatattttgtacagctctacaatgtgtttctgtgttaagtgtcaaaaagttaaagtttaaagctaagagtcaaaacattaaaaaatttaaagtttataaagtaaaatatacagtaagctaaggttctaaggttaatttattgaagaaagaaaagtattttttaaataaattcagtgtagcctaagtgtatcatgtttataaagtttacagtagtgtacagtaatgtcccaggatttcacatttagtcaccactcactcactgactgacccagaacaacttccagtcctgcaggctccattcatagtaagtgctctatatagatataccaatttttattattttattccatattttactgtaccttttctatggttaaatatgtttagatacacacatacttagcattgtgctgcaattgcctacatatttagtatagtagcatgctgtacaggtttgttgcctaggaacaataggttatatcatataaccgaggtgtgaattaggctatagcatgtagatttgtgtaagtacaatctatgatgtttgcacaataatgaaatcccctaatgacacatttctcagaatgtttccctgttgttaagcaacacatgactgtatatgtgtatataagatagtcttttcaaagaacaaaatttggttttattgattttttctatcattttttgttttccatttcttttttaccctattagttgtttctaattttgaggggtttattctaacagctgaactggaatgcttagctttttaacttttaggtgggcatacaaagtgatacagttaccttagagagtaatgtggcagtatctagtaaagccaaagatgtttatatcctagtgccaaaaaatagttccaatcatacttaaacacagttcatatttgtgcacaaataaaaaaagagttgtacaagatgtttatattaacatcataagaaccaaatattacaaacgacctaagtagccattaagaggagaatggatagataaattgtgatacattactacaatgaaacacacacagcagggaggatgaatgagccagagctccatgtattaatatagatagcttccatgttgaatgacataaagcacattgcataaagatacatacaggctaataccatgtatatgaagtttaaaatcatgcaaaacagtactatgtatgtttataggatacatgtctatgtagtaaaaagtataaaggtgttcatgggaatgataaacaacaaattcagaataatgcaactttagagagtgtagagagaagtacatacagagaaatatgtttgtaatattttatttagatgggtgatgagtacataagtatttttaatcataaatgttttacttttttgggtatccaaggtagcaacggaaacattactacatgaggtatatactaattgagaaggaaaactcttagataaaaccttttatgatgatagtagtggggaaatgtgggcatttcaaaggtagtaagataatttttaattgtttgatcaggtacaaagtgtaaaaaatataataaattagaatactttatattccaacttcataagcttcagttttatctgttttagcttgaacttacttgaagctttttactcagaagtacaaaataagataacattgagaaagctaaaacattgtgtccttttctttgcattgcatttgaagcttgaaaaatagagttgtttaaaattgtaatgatcttagagatgacttggtccaattctcccaccccctccttttataaatgtcacagtgatacaatcatccatccattcaccctccatccatctgtttattcaaccaataaatgcccaatattgtgtcaatcattggggtggttgaagtgatgacaaagaaagaaaccatggtccctttcctacaagtctagaagaaagaactttagggaagaaaacagtcacataaccgtatgggtagagatatattacaaatgcttcagaagcacagaagagggaagtaataacttggtcagtggaggtacttttcagctgtgtttactgtagagattataaaatatttatttttattaaatggagccagcaattttattactcatttggacatattttaaggtatacctcaaagatatttttaattttttaaccatatgagatatgtctaataaacatggcaataaggtccaatggcattcggccttttacatgtattgtgccaaataaagacaccaagattttaccaggctccttattcttgaggttatttctgctagtcaggagtagagtcaaatgagctctttgtaaatcactgtgtcagatttatagagaaaggaagcttgtaaaagtgtttcttgtggtcattaaatgccctttgttttctgcctagagcttgctatattgatggtctaaccaacatatccaagaaatttatggggttgtagttttgatctcactcagtgagagagtcagaagggagtagggaagagagggcatttgagtactcagtgtctttacagtattcccacaaataaaatgcttggtgtttgtatgagtgggcaaaggaatatatacttaaagccctgagttgaaaaccgaaaatacataaactctgtcatgttgttagttctgtcactctgcgacattgggcaaatcaatcagccattccaaagcaatcattaagtatgcaggtctctttatctgctttatccccacggccattcagttaccatacaggcagggcttttcctaatattttgtgtctcaaaaaaaaaagtttgactattgacttacaattgagcttttcctaagtctcttatttagtaagcattctctcaattaccttattttaaacaatcaccaccaacaaaaagggacctgtaataaattagcaacaatttcctaatattatcaacataaatatggccgtatttaaggccaagaaccaagctatcaaggaaggttgaggagtgtttaagggaaattaaaagattagtctgagagtagtcaacatacagtgtattctaaacttggatcacgctctctctagctaaattatgacatattgcaagatttgggattcttgtgaaacactgttaaaaattgaatttaaggtcagatgcaatgactcatgcctgtaatcccagcattttgggagactgaggcgggctgatcacttgaggtcaggagatcgagaccagcctggccaacatggtgaaaccccttctctaataaaaatacaaaaaattaggtgggtgtggtggtacatgcctgtaatctcagctacttgggaggctgaggcaggagaaccacttgaacccgggaggcagaggttgcagtgagctgagatcgtatcagtgtattccagcctgggtgacagaaaaaaagaaagaaagaaagaaagaaaggaaagaaagaagaaagaaagaaagaaagaaagaaagaaagaaagaaagaaagaaagaaagaaagaaagaaagaaagaaagagaaagaaagaagagaagagaagagaggaaaggaaaggaaaggaggaaggaaagaagaaggaaagaaagaaagaaggaaggaaggaaagaaggaaggaaggaaaattgaacttaagctacagattctggtgggaaacagtttcatattggaccaagctcaatcgaggcctgcacatcacatatgaaaaaaagggaaaagaaaacttttaggtgaacaactgaattgtggccagttcttaagcctcttcaaaatctctcagtgatgacacctgggaaacaaaggtaaatagccactgtaggggaagaaaaatatattttcctcacctttatgacaaaagacagattaacaagagaaaagcatacaaatttatttaatataacttttatgtgacatgggagccattataagaaaacaaagacctaaagaaatggttaaacttgtatatttttgtgctgggtttcatgaagagtatacagttatggagaaatataactggacaaagagtgcatgatctaatggtaataaactggggaaatttagcaaggcctgtctattctgattcttctctttatgctatgtcttcagagataaagatgttcctttccactgggaatagagagggcgcctctcgtatgagggtttcatgagggttttacagtctgctttagggaaaagtcaaaacccttcctaggttttatgacctgctccagaggagatgagtggtgtttggggagaggggaggtgagagtggcctttctacttctgcagttttcttaaattctttcagcttaaaatattttgggggtagtgtgtcctaaaccccatcagccaatcaattccaattatgggcttcagggtgaggggccgtcagcatttgcagatccacagataatggtttaaaggacaagcaggtggggaaaggtggcagatagatacctcctataggccagcacctccctctgctccttggactggtcttcagtgttatgactggtgtttgagtcatcatggcacctcacaactttgcttagtttcctaaacattcaattgatatgaacacccctgaccccccattctcattacccacatcttctctttccattttccttccatataacttactaatttattttgtttgttgtttaagcctttgcctcttctctctagaatgtaatttcccttagggcattaatctttgtctggtcactcctttcattttggccaaaaactggtcaggaaatatttgttgaattaagtttaactaactctggcaagatgaacataaaatggttattttatttggaacaaatattactcctgaaaagcaaatggaaaggaagtgtatatcaatttttttaagtaatctaaaataaaatgtttaaaaaaatttttttaagactagtcaaattcagtggtgagaagcggggaaagggtagaacaaggagtttaatctgtgaacagtcaattgagataattcattacctttgggccagccaaaacatgtctgatataaaaaaattattatagaagtgtgatgtgacaagtcagtttattaatatgtagatgtttccaatgataagtatgtgaggtgaggaatctgttaattagcttgatttaattatttcacaacatacacatacatcaaaacatcacattgtacactgtaaataaatagttttgttaattatatcctaataaagctgggggataaattatttttaaaaatctctttgcctgagctaactcaatgaagataagagtttgcctgctttgggtcggtttctgaaggtttttggagtgaaccagagaatgagttgatacgatttggatgtttgcctcctccaaatctcatgttgacatataatccacaatgttggaggtggggcctaatgagaggtgtctggatcatggaggtggaatcctcatggcctggtacttttcttgtgatagtgagtgaattctcacgagatccagttgtttaacagtgtgtggcacctccctgcacccctctcttgcacctactcttgtcatttgagacacctgctccccctttgccttctgccgtgattggaggcttcctgaggcctcaccagaagccaggcagatgctggtgccatgtttcttgtacaacctgcagaaccacgtgccaattaaacctattttctttatacattacctagcctcaggtatttctttataacaatgcaagaacagcctaacatgtggctagaggaaaatgaggcctaagggtttgaatcatgggggagactgcttataataggccacatctatcttttagttcataaaaggccacaggtcaggaagaagcatgtccaactagagaggatggagggtaatatgatgtttctgggtgataggacttaaatctgatttcatgtctgcaatatggataattagacattttagaaattagattagaaatgagacacttaaaacgataagtattctgtttgtttgggccttgtgggtacagaattcataggagttatagtgaataaaataaaggtaaaatttcccaagttcctcctcctcctcattttttctccccaagtattatcttctgttagcagattgattttttatactttattttttaaatttttacaaagtttgtatttttcaaaccattttatgtgtacaaactaaaaatttgtacataatatttaaaaaataaaatatcattgtcagggctaaggggaaagttcccatttgccagcagaagctttgctgaaaaatcaactcacaaaaatcagaataggagaaaaggcatacaaatttatttaacgtgtatacatgggagcccataggtacagggagaattttctatttttatgcttaggttcagtaaaatatggacagttgtacagaaataggattggacaaaaagggctaatctaatactataggggccctctctgaaacgggggtcttaggacctacagtcaaacaaggtaggtcagataatttcttcatggccagtttctacacaggaacgttgggggaggaagttagagtaatatatttaggtgttatggctggcttttggaaaagaggttctggtttctatgacccgccttggggaagatggattctagtttctacgacaccttggagagaatgggagtgagagacaggagggcaggagaaggtcaaagagaaacttttgcttttcagagtgcttttgaggctttcatttttggggtattgttttctgagtcccgacatcatcaaactgtactgtaactgttacaactatttcatttaataaaatatagatgtgtccacatcagtacatgctggcaaacttgttctttgtaatggctatataacatttcatgatacgaacatactaaaatttatttaccagttcctgtattgataggtatatggggtgtttctatgttttattatagcaaataatgctgtaatgtttatttgttaggaattatgtctattcaaatgacttacaaaatatagtctgctttaaaatagaagcttctttgagaataaattatgttttcttttttgccactaagtccaatttctggtgcttatttaaaaatcttagtattataaaatgctttgaaacaaggaataaaaacactatacagtaattgtatgatgaatttaatgtttacataataaagataggcatttattttaattacccaaattttggcagatgtcccttctgctttcctctatcaattagttacattactgatgatggtgtttttgaacagagcctaatttcgtctcatcagcatcactgaaaagaattgaaatcacaattactatttttagttatttctcttgtgtcatttcttacttttagcataaatggaagctatttaaatatttagatcatgaatttggatttgtgtctgctgttctgtgtgttataaatttggaattatgttatatattaatgatatatgttaagaaatggtgaaaaacaaaaaattgcccccctttcaccaagtcttgttggggcctgagatattctaagagaatgtattttcagatacaataaattgaagtatactttctgaaaatattttaaccattttaatggaagtgatcctaaatcagtattagtcacctcttagagtgtttgttttctattcctagtaaccacaaacagtggcttaaaacagcacatttattctctgaatttccatgggtcaggaagttgagcacaggttaagtgggtcctctgctcaggatctcatcaggttgccaccaagagggtgacgagcctggggatcaccttagaattctgtctttccgtgattatcttctcagactgtattatacttcatttaataaattttgaaaatgcagagcaacattatgaatatccattcccatactttgctattatatagaacacaattctctatcagctcttgagttacagaaacaatcacttctgcctttgccttttaatctttgcttgagggttggtttccagaggcctgagtttactagacagtttagataaaaaattaatgggaagtgcttatataagcatctgcatgttatgcacactaatttacttgtttcagaggggaagggagatgagggaaatgtggcaatttgggggttgtagtaaataatttttaggggaaaattaatggtcttgcagaacatgtagtggcccgggacaaagtctcttaggcccacagaccagacaatgatttgtgactaaagtctgtccatgtgtcttgacaaacttcagtctcttttcccacttaacctgtgctcagtatcttttcctgaaatatgagttaagttaacaaaaactccaggaaggaaccagaggcaattgttttcttctttggcaagtccggacatgaggcagataggggaagtttagagaacaccttcagcctttattttgggagacacaaaagattgagagatgggggaatgaggggatgttagagagactttgaatcgacttcttcaggccagcatgtcaaagtgccatattttggatatcggtttctgggccccaacaagagtcaatcataaaataaaatggctttaagctcattgcaaggtaagtaggaaaataaatgccaataaataagaattttataccatgatgtggtgtacaagtatacacacaagtgtgcaagtgtttcttatttacgatgaaacaaaaggtgatgaaactaaaatatctaattaaatataattattaaaattattatatgtgattatatttaaaaatgattaaaagatgcatttagcgactatttcatttcactaagtgagtgatttttcatccaggggtcattttgcaacccccctccctgcccagagatatttggcaatgtctggagacatttttccttgtcataactgggggacgggttgcttctggcagctaatgagtagaggccagggatgctgctaaatatcctgcaatccacgcaacagcccccgtatcaaagaattatctaggccaatagtcaatagtgttggggtttagaaactgtactaagtgaaaaaagcagtctctaaacctattttattctatgtcatttttttacacttttaataagctatctttattgttcattttaaacaattgtattattcaaatatttaacatttattgagacatttcacctgacttagtgtacagacaccttttataaatgccccacatgtgcttaagaagaacgtacattctctgttcaggattctaaatatactaaataaaaaatgtatctaatgttagatctaaatccttactaacttgtgtacgcttgatctaataatggtgtgttgaaatctctcacttttattgttttgttcaatttttatttgcagttgtatcattaaaaagtttggaactattttgttaggtacatacaaattcatgattgtcctatcttgttaaagtgttgttcccttcatcataatttggtgtgcttttttatccgtactcataatatttcatctaatgtctttttgtctgatagtactagtgtcacaattttttttcaacttttattttagattcaggtggtacatgtgtaggtttgttaactggttatattgcgtgatgatgaggtttggggtacgaatgatcctgtcacccaggtactgagcatagtacccaacagtttttcaatccttgtcccccttcctcctgccccccatagtagtccccagtgtcgattgttgccacatttatgtccatgcatacccaatgtttaactcccacttagaatatgcaacttttggttttctgttcctgcattaaatcatggaggataacggcctccagctgcatccatgttgctgcaaagaacatgattttgttcttttttatagtggggtggtattgcatagtgtatatgtaccatatttttaaaaatccaatccaccattgatgggcacttaagttgattccatgtctgctattgtgaatagcgtacaataaacatgtgagtgtatgtgtgtttttggtagaataacactactgggtatctatcctctggctggcttttggaaaaggggttctggtttctatgacctgccttgtggaagatggattctagtttctatgacaccttggagagaatgggagtgagagacagtaccatttcttaacatatatcattaatatgtattctttgggtagatacccagtagtgggattgctgggtcaaatggtagttctgttttaagttctttaaggaatctcctgactgctttccacagtggctgaactaatttatattctcaccaacagtgtataaacgttcccttttctccacagcctcactaggaactggttttttttttttttttgatattttaataatagctattcagactggcaggagatggtatctcattgtggtttttatttgcatttctgtgatgattaatattgttgagcattttttcatatgttgctggctgtttatgtgtcttttttttttttgaggtgtgtgttcacatcttttgcccgttttttaatggacaaagctattttaaataatgattccaatactgtgaaagaagccccaactatatattttcctagctatttatataatgtatctataaagaatcagacttccccccactatctataagataagaacattattttatgtaaaagttagtgctgaatggatcattggcctggaatgaaagagtcaatctatgaagtcgcctcacttcttactcacttgtctttacctgttgtgtgtatctggttgtcctgtctccccgttcatctaacatctcttttaaaattgtatgccttgtagtcactactctcctacatagttattatatgtattctttgtgtttacatgtaatgagtcaagattatatatgtaatttaatgtgctgtgtatctgagtctgctgctgcacatttctctctgatcccatgctatttaggaatagtaacaatttattttcctgcataatatctactatgtgcttcactaaatcttcctgtgtggtagataagattaggctactacaggggaggaaaaagtaattttccctctagccttccaagttcttggttggggcctctatgccaaaagacagattaacaagagaaagacaagtttattaatgtgtttatctcatgtgtatgtgggagatgcccaggaaaatgagtaaatgtcaaagaagtggcttagagcttgggttatatatcatcttcagctaaaacaaagaaagaagggtgtgggggaggcaagttatgggaaggtgaccaggaaaaacacaagaataaggtctgttgtgcagacttgggtgagtgagtctctagtgatttagttgtccttctgtttctggtatagagaggaagttacccttacaaatgggagatttcctttatcagtgtaaatttcccttacaacagggtaacttctactctgttttcagggcttctctgtatctgcagtttctcaaaataatcagctcaaaataattcttatgcaaaagaggcatattttggggtggcataatctggtctcctgcaatacccattggggagatgaggtaagtggtaaaaagagagatgaagttaaccagttaggaagatacagaaatgagtggccaaatggagtcctacaatttggagaaaaacacaaagaagcaaacaaatacaaaagaaagaaactaagtcatgtttaatttatgattgccacatgctaaaggcaggtgatatttatttggaaactcaaaaatgaaatcttacattttatagtaagaataaatatgattataggggtatttgctttttaaaatccattttaaaataattcacttattttcatgcatttttctgttccattatattgaagaacatttttgttaccccaaaaactcaaggtcaaacatatatttattataaattaaggtgtgttgagctgatattagggagatttcactaaaatatattttgacctaatttgaggagactaatgttcttatgcttagcaagatgtgaaacacaatttgtatctgaatgcatttagaagacacaaataaataagtctctattcagtcttagtagccttaaaatttttaattaataaactaaaacttgatgtaaaataccagagtacagtcataggaataaaatataattacactttcctggcctcctcctgccctgagctccactgtgattctactgtttccatataacctctgtgtctatgcataaatgctcatggactaaactttttttcattactggaaacattctgggaaacatttcactagacaatgtattgcggttatctttttcagtacatacaaatccatttcgctgttttgtagctttatggtattccaaaatatgtatgtaataaatttaaccattaatatagattatttgggtgaaaatgcccaattttctcaatattgagtcttcccttccagtttctcttttaattcaatcttttaaaatacactttaatattttataattttattcatatagggccaccacatttcttattaagcttattcctagtagtttatttttatttttgttttttgagacagggtctcactctgtcacccaggctggagtacagtggcgcaatctcggctcactgcaacctctgcctccaagactcaagtcattctctctcctcagcagtgttttagtatttgtttcttttcttcatgtttggtgggtgggtggatagataaatgtgtggagcagaggttgtttgtgctgttgtcaaaaactcttttatttttttctaattatattttctaactggttattggtggttatagggcaactttggttttataagattttctatctcacatgttactgagttttgttagttttactgatttttctattgagctgctagaattttctagatagaaaatttgtgtcagaatattatgacaaaaacagttatagccatttcccaatgtttatgcttatattatttatatattgaatcatataggacttccagtccaatgttgattagtcgagatgagaatgggtatgtttgccttattaatggctttatggcaatgcttctaatattctatcaccaagagtgatgtttaccatagatttctggtagacctctttattcaaattaagaatgctactaggcatagtggctcatgcctataattccagcactttgagaggccaaggtgggaagatagctggagcccaggagtttgagaccagcctggacaacataggcagaccccagtctctacaaaaatacaaaaattagctggtgtggtggtgtatgcctgtggtcccagctacttggaaggctgaggtgggaagatcacttggacctgggaggtcgagtctgcaatgagccatgattgcaccactgcactccagccttggcaacagagtgagaccacatttcaaaagaaacaaacaaacaaacaaacaaaaaaatgtttttcaccattcctatattagtttttcttaaagaacaaatattgaaatttatcaaatgctttttattatctactgaaaagataataagcttttctgctttaacagagtaatgcaattaaatccatatatacattttaaaataatgattgcattgttatttaacatagaccccatctgtacaaaaataaaaagaaaaataattatccaggtgcagtggcacatgcctgtagtcctagccactcatgtggctaaggtggcaggatcacttgagcctaggagtttggggctaaagtgagccaagcttgcagcactgcactccaacctgggtgacagagcaagaccctaacaacaaaacccatctatgcctttgtgggggttaattttgactaccctttccaattcttctttggttatttggcatttcatgttatctgtatctccttattttgcaaatttatattttcatagaaaactgtttatttcatctaggttttcaaattagtgtcatgtatagagaaaaacaaatggattcacttttgttttgataaagacatctaaattccactcagagtataatgttgcacctcattctacttaaaatacttgaagtttgtgggctgagtttccagtgaaccttccatatgtctatatgtgcctatcagttcaaaagcaattgacacattggcattcttagctgttctgtacttagctgtaagccaggaagttgcatctttgaaagtcaactgtatttgtgcatcacggaattgtttgtggcaaaccatattattttttgaccactacttattccaggcattgttctaggtactttacatatgtaatcactgacattgcacaaatgatataatacgtacttaaggcaatattgtatttcttcaacgttccaggacaagtttgtgtcagagttgggatttgaaccaaattttgtggcagcaggggaaaattcatgagagagtaccatatccctggcacagatttgaattgttatagaactagagctttttagggatctagatatatctgtatactccaagaatatgcctcctgtgcctattttaagcctggcagacatttggccaggaaatgtgtctgatgtgtgacttactagtcaggtgcctttttctagaggtgaatgaaggcatgttttaaatctattactgaaaatacttgaatgtagagctttagaattgttgataatcaaagtgaggtgcagatgagtaaaaagtgaggtacactgagggtaatctgtgcaggagtaagaaatcatcatccagattattatgtgattcttccagtgctcaaaaaggaaacaggttataggaatccctgacaatatatcctgggataaaatttattctggagctttatacagtaattagttgagctccaaaacaattgaaaatgttcatttcagtggattaatataacagtttttaataaggattactaaaaattttctgtctcgtttaacaataatgggcttatttgtgaaggaagaaatatggtttgaacccttcaggttagtaataagtacacagaatccatatgatttttatatgtcagtgtgcatattaataatatccatttactaaaggaagagaaggcaattaacataaaaatagagtaattaagctt

SEQ ID NO: 30 - DNA, 91536 bp, Homo sapiens
accatggcatgaggccatatttagaattaaaaataatagccgggtgtggtggctcatgcctgtaatcccagcactttgggaggccgaggcgggtggatcacgaggtcaggagatcaagatcatcctggctaacacggtgaaaccctgtctctactaaaaatacaaaaaattacccaggcttggtggcatgtgcctgtagtcccagctactcgggaggctgaggcaggagaatcgcttgaacccgggaggcaaaggtcgcagtgagctgagatcacaccactgcactcaagcctgggcgacagactgagactctatatcaacaaaataaataataaataaataaataaataaataaataaataaataaatatgaagtgggtaaaaattcaggggaagcttctattttttttctaattcccctttgcccatcaagtgaaacaaacttaagcttctttcacatgccaggtcttcatatatttaaagataagttttgtgttcccaataattactcactttctaggcccaagctcgctatttgtgtcagtgtgccttatagaaagttcaggtcatggcacagtctattttaatctgaataccctctagtttgttcatgcctttcttaattactgtggttattattgatatgaataaaattttctgtgagtaaatacaaactttaaaaaatagaataatagaaaacacttatagcatccaaaagccaaatatataaagatgactgagtacttgtctaatgatttttctgtttttctactcagtgtgactgatccatatgaaatcactctctaagagctatagcaggttttgtgtggctgagtgttcgcataacccgacatgtatcatcagataggtggaaatgttcatctgtgtgtgagcatagctaattgcacgagtaaagggggaaccatgtggcttttgattaagaaatggaaaatgtaaaaactgttcagtgaatttgagaagctgcactattccctcattcccctcatataaactagtcttccaaaacaagcactgcccccttaaattaaaaaatattcatcctctctctccttgcctgtctccctcccctgacattatttatagaattatttgaacattgagctgcagggtgagttaattcccttgtaacaaacggaaagtgttcagagtcagacaaaattttaaattagtgaaaagtagatatatattttttaaaaacacaaatctttcttgagaatgatacctttgggtttaaaataataatgtggtatctgttggcacactggcacctctcctctcattattgacagacctttatctcctcttcagcctgtgatcagctgtctcttggggtggctgccatcttcgggccttcacacagctcatcagcaaacgcagtgcagtccatctgcaatgctctgggagttccccacatacagacccgctggaagcaccaggtgtcagacaacaaagattccttctatgtcagtctctacccagacttctcttcactcagccgtgccattttagacctggtgcagtttttcaagtggaaaaccgtcacggttgtgtatgatgacagcactggtaagaaaaatcagtatcttttggagctatgctttaaatatagataattttctgaagcccattccaggttcttattgtattcttatgtgctttattttgagttttgaaaattcagctaaggggtagaaagacagaatcaaacaccaatcctaatttcacatatccaaacaaagaatacctatgttgaatacttcttctctgtatttgtaaaataagcatttttttattcctgtgaaagatcagctagtttggtaggttggatgaaggatagatgtagtaaacaatattatagatagatagatagatacacacacacgtacacatacacatacacacacacatatgtatatatatatttagaattccagtcatttaaaaagtaagaatccatgtattcaaaaacaatttattcaaaaacaatatggtctaacaatttagatcatattgaataatgtgtgtgtgtgtgcgtgtgtgtgtctctgtgtgtgtgtgtgtgtgtgtgtgtgtgtgtgtacatagacagatagatagagtcactctgtcgcccaggctggcatacaagggtgcaatctcagcttactgcaacctctgcctcccaggttcaagcgattctcctgcctcagcttcccaagtagctgggattacaggcatacgccaccacttctggctaatttttgtatttttagtggagtcagggtttcatcatgttggccaggctggtctcgaactcctgaccttaaatgattcacctgccttggcttcccaaactgctgggattacaggtgtgagccactggacccattctgaaatatttatttaaagaatttttctgctatgaagtttttgctagggtagtttctcaaggcaaagccttgtgatgagtcagtgaaacttgccaagaaattcagaattatgccttactattttatctggctgtttatgtgcaaagaatgcatataaaacgtaacaaactttataaggcatgttaaggttagaaaagtttttactcatatgtggaacaatataatattcactgaaacactcaagtttgtggaactgcttttgtgtagatgtcatttagagacttagaaaatagaatttactaaatgatatttatttcagtgagttaaaggaatattttaataaatatttgctaactacaggttgtctgctttcttatgttaatgcattttattatttttgcatacaaatggttatcttgaattatcagttaaaaacaagtctcagagaaatacaataaagtaacaaaaatgaaattttaattttcattgaaagttacattggtgatgcagctgcatactattttgcttactatagagtgataattaattttactttaagatgtttatcaacaatataaacagtgctctttaaattagaacataaaaacattttattttaggacacttcgctatactttcataattacattgagattgaatttcatttgaatttaaattctctcaaagtatgccaggagcacattttgttcatgcatgcagtatatagaactctgtgcagaaatttgcccatttgccaataaaattggtcatctgcaaattgacagataagaactctttcaagggaataggaaactgggagctacaggattaaaaaaagggaaaataatttcaaaaacattttcaattagataagaaagagtgaaatgcatctagatacaaattagagtaattttgttttcttatttaaaatgtgaaatatttataaataattaaaaattaggaatacattattaagagtccttaaaaataagtatgtttgatctctgttagctcaaattaaacctattaaatttattatattgctttcttcctaaatcattacttctttgtcattggtaaagttctgtgttccaattttgaatgtcaggttctatatgaatgatttctgtgagtatgtgtaatcaaatgatccaagggatcctcagttgcaaattggtccacttatgtttatggatggtcatctacaaaactatataaatatagatacatgtgcattgttaatctgtggattgtttacttctccattccttcctgatgtaattcatgtataggttgtccaaacatcatatatccttataatgtatacattatatacatatgtgcatgcacacagatatgtacatcatacatgtgatattttgtattaattatcatccttaaactcctcataggaagaagaaaattgacaagtattcaaaatgtctacagacatattaactttattcacaatcctacgtgtatgcacatgtgtggcatttttatttaatatatgtgggtcttaagtgattcactaaatagataatgggatttgcaatcaggtcctacaataatttggtaaaatacagcctcatgtatttgatctattcctgctttaaattatattctcaattatatcattgaggcaaacataaatagggacacatgtatagctagttgattatatacatttaatggagtcctgacctcaaatttattaaaatgcttactatttagttactcattactatttaaaggaaactttgccactcccttggctttgaaggtgacatagacagttggatatttgaaaagtctgattagttaagtggtaatgctaacttagaattgttacagaattattcatagaataaatatgtcttgaaatcctctgaagaataaaacatattgctgttccattttatgcaacatttaattcaatgaattttgattatcaactgatacatgccagggagagttaaatgccacgaaaggaattatatgccactaaaggaaacaaaggcccagcccttgttgagcttctaatccctattgagggacatgtaataactcatatttttaatactatttgcaatgggataattgcacttgtaacagaccaattgttgcctcttactttacagcatttttgagaactttgattatttaatatgatagaactgactcgaaggcagaaaagtccctttgaaatgtatttataaatatatagtagactttttgtctttttgtttatgtttcaaagtctcaaggtagaatttttttcaactttcattttaaaatcagggagtgcatgtgcaggtttgttacaaggctatattgcatgatgctgagcattgggtacaactgaaccaatcacccaatgaacagggtatccaatagatagtttttcaacccttaacctcttctctccctccccacgcttgtagtctccagtgtctattttttcctagatttatgtacgtatgtaccaaatgtttagctcctacttataaataagaacatgaagtatttggttttctgttcctctgtaattcacttaggataatggctttcagctacatccatgttgctgcaaagaacataattttgttcttttatatggctgcatagtattccatggtgtatatgtaccacattttctttattcaatccacaattgatgggcatcttggttgattccatgtctttgctgttgtgaatagtgctgcaatgaacatatgcatgcatgtgtctatttgatagaatcatgtattttcctttgtgtatatacccagtaatggtattgctgagtcaaatgtcgttctatgtttagctctttgaaaaatctccaaacttctttctacaatggctgaactaatttacattcccaccaaactgtacaagcattcctttttctctgcaacctcaccaacatttattgttttgacttcttaataatagccattcagactagtgtgaaatggtatctcattgaggttttgttttgcatttctctgatgattagtgatgctgaacgtttctttcatatgtttgttggctgcatgtacatcttcttttgaggagtatctgttcctgtcctttgcttacttttttaatggggttatttgttttttgcttgttgatttatttcagtttcttataggttctgggtattagacctttgcttgatgcatagtttgtgaatatttgcaaggtatagttttaatgatagaattcagcaaagagaatttgtcagcttctcaaaagagcaagatgactatttgatgatgtgataggaaatttactgtgaactgaaatgggaaaaactccacctcatacacaataaaataaacattactgtctttatgatggacttatgtatctgcttttactgcaaaacacacatgtgcttttttttttacatatttcctttttcctttccatatttatttattatgtatgctgttgctcccatttgtattcatttcttttttgttgtgttgtccagtttgatacataataattatactttcatccagtctttgttcccacccccaaaacagatgggatgataaatgaaatatagtgctggaataggataaattcttaaaatgatgttaacaggagctatttattttttacgataattagcatttgttgttgtcatggatgaatgcttttaaacaccctgaaagtctgttatagctctgaatgatgtccaaaaatgatggaaaagaattggcttcagaaacaaagctgtgtttctgtcagtcattttggaacatatgattcattttaaatataaactaaaaataagttggctagatgacagcttgtaagcaattccagaataagttgttcatatttgctttaaaatccctgtgtttcatctttgtttatagatcagcagtccattaacaaaaaaactctggactggtaaacagaagcatgggattctattcccagttttgctactaaattactggtacaacttcagaaaatacaagaagggaatggaaatgcctgcagaaatgagctataatgcactatgaattgacattgtgttagttgctgtcacgtaaactatttcacttaatcttcaaaacaattctgtgtgtcccaaaggaaacaggtgatcatgacatcatacctgttatctccagtgactggctctcctgctcaccagagcctaaactagaaacatgaacatcttccttgattcttttctttttttggctcgacaacaatcggttgtcaattctatacttgtatgatctctcaaatcttttatttttttcctaccccctaccacttcttaggtcaaaatcacctccctctgtcagctggatgattaacagccttctaactggtctccctttttctagtctctccattgcagttagtgtaatttttttaaaaatgcaattctgatctgtttccctcttaatagcttctcattcctctaaggcatttttaagaagacttacaatgcttagtgtgatgtagcccctatacttgtccagtgatatttgagtccaaatcccccactaatttatttcaaattgagccagtagacaccttttagttgttgaaaataatcttctgtttacctgggaagctctctttctgatcctattcctcctagccatgaagtgcacacgtacatgtgcacatttgcacaaacacactcaggcataccatccagcttgggtgtcacaaagaaaggctgccctgacccctgctttcaagtctggaataggtctctccaaacacatcccaaaggaccatggaaacacccatgaccatccccacccccatgagaactcttatcacactctgaatggcttttcttgggtggatcttctactggatcaaccacacatctgagcagggtgaaccctaaggctgctcactgttttatcaccagcatctagaatgttgcctggttgtggaagtaccttaatacttcttaataataggaagatgtgttatatccatttttaagcaagataattccaatgagttaagtattctgccaaagtcaaatttggttaagtaggctttaactacttgccaaggaataaatagattcagccataattttcagatatatggacatgactcttttatgatttcaaaaattttataagaaagctcgagtgaattgtgtttctttgatttcaactgcagttaaacatatatatgtgagtatatacatatatatgtattcttatttgagcaattattaaatttatgtataccagctgctatcttaggcagaggggacaagaattatagataaaactttgaccttctccatgggctcagagtagagtaagttaggagagaataacactacactctagtgtaacaagtgcacagagaggcaagaaaacagcatcatgacatctcaggagaagaagggctcaggagaagaagctgcctggaaaggatggagaagagttttagagaaagtgacgttataaaattatcatgaaggataagtaaaatgctgcaactggagaagagtctacagtgtgcaacatgtgtaaatgtgaagatgactgagggagccagtttgtcaggaaattgcaagcacttcattatgactgagtaacagaaacaaggaagatgaggaatgatcaatggattttataaaaagctagcgtaggagagatcacagagagctttgtactaccaagtccaccttttcttgcccaccctgccctggaatctacatggttatagcaatatcagtgatgtttgtgtgatgtgagcctgctttcaaaccaccatggaatgcctcaaaaattggcatatatccattcacctttttcctggaaactcagaaaaagacatagagggccatctgtcagcctagactattgtggttactacggtctttggtatcaggacattctagactgaaatcctgaccctgtcgtgtagtttttagcaagggatttgaccactaacagtctgagagttgatgcatgtataaggtgaggataatatgtgtcatacttcacaggattgttgttgtgtaaagtgcctcatagaggaaacataacaagaatttaaaactttcaacaatataaatgctatgggccatgtgccatttttcttcactaaactctatgataaagaaattattaatctcacaatttttgaaattgatgcttgtttattataggaaattcaggaactacaataaagtttaataaaaataagataaaataatcaagattttttgctatcaagttaatcattttagatttctttccagtctgtttctctacaaatacacatacacatacacacaaagagcatatcatttagagttctgggaaagaaacagaagaaacacgtagcttgtaatcccactattttaatatgagaaaacttagatgcagtgagttgaagtaatttgcccaaggttacatacatagcacataagtgatagatctgggttttgaaactaggcagtcaactttagaatctactctgttaaatactgttacatgatgttagttgttgttttattttgtgggggttttttttggctctttttaaaaatcattattttaagcaagataatggcaagattagaactatttttggtaatggctttctgactgcagtgtggagaatgtgttggggatatgagatatggagagcaatagggcaacactggaagcaggagaattcctgaattagccaagttgaaaagagatgacagtttcaattaagaagattttgatggaataatgttgacatgaagaattctaagaggacttaggagatacagattgtagaatttagtaagtggttgccgggaaggagtgatgaagacaggaaataagaattactctatgttcctagttggggatactaatcagtggcacatttacctagaaggggaaaacaagaaaaacagcttcaagagagaagacggtgtctgcttcttaacatatgaagtttgaaacatctatgaaatattcacttgctatcattcagtggtattgtatatatcataaattcatcttaaaaataggaacttggtctgggcaggcatataatgcttccattggcattttgctgtgcccttcatttgaacttctttgtagtattaggaaatgaagaaaatcaacaaaaaacaatgaaataaaaatagggtgatagtacaaaagaaatgagttagtaggtgggcagccatggagataaatatagacatgagaagagcttacagacagaatgtacattcttttcattagtgaaggaaaagcagtaatatttttagaaatagtaatatttaccaaattgagcctagactaatttctatgatacgatcacaggaaaaaaaaaagccaaagcttttatcttaagcaaaaacacaaacactttcttaaaacactaactttattcatttggatgaagtatacttatagattgctttagatacatttttgtgtgcttttggagttagcataatataatggaaagtcaattaatagtgaaaactcattttattttatcttgcacgtatatttaaataggataaaataaaattaaagttaatataaaaatgtatattcctggaagacactaatttttgaataagataatttttatattatgaagcatacaatcaaataatttccattttattttagggagtggggtaatttggatctcagatgattatatgttgtacattttaaatacaagcttcaagtgctgtgttctctaattccaagtgcaaatacaattagcaattatgagttaaacttaattatttggatatacttgattacatagcttggtgtagtagtatttccacacagttggttatgcttgaacttatttttttattcctatttaagcaatcataaaaatttttttagaaaaaagttaactcaagatggattaaagacttaaacgtaagaccaaaaaccctaaaaaccctagaagaaaacctaggcaatacctttcaggacataggcatgggcaaagatttcatgactaaaacaccaaaagcaatggcaacagaagccaagattgactaatgggatctaattaaactaaacagcttctgcacagcaaaagaaactatcatcagagtgaacaggcaacctagagaatgggagaaaatttttgcaatctatccatctgaaaaagggctaatatccagaatctacaaggagcttaaccaaatttacaagaagaaaaaaccctatcaaaaagtgggtgaaggatatgaacagacatttctcaaaagaagacatttttgtggccaacaaacatatgaaaaaaagctcatcatcactggtcattagagaaatgcaaatcaaaaccacaatgagataccatctcacaccaattagaatagcaatcattaaaaagtcaggaaacaacagatgctggagaggatgtggagaaatagcaatgcttttacactgttggtaggagtgtaaattagttcaaccattgtggaagacagtgtggtgattcctcaaggatctagaaccagaaataccatttgacccagtaatcccgttactgggtatatacccaaaggattataaatcattctactataaagacacatgcacacgtatgtttattgcagaactgttcacaatagcaaagacagaatcaacccaaatgcccatcaataatagactggataaagaaaatgtggcacatataaactatggaatgctatgcagccataaaaaaaaggatgagttcatgtcctttgcagggtcatagatgaagctggaaaccatcattctcagcaaactaacacaagaacagaaaaccaaacaccgcatgttctcagtcataagtgggagttgaacgatgagaacacatggacacagagggggcacatcacacactggggcctgtcagggggtgagggagtaggagagggatagcattgggagaaactcctaaggtagatgacggcttgatgggtgcagcaaaccaccatggcacatgtatacctatgtaacatacctgcatgttctgcacatgtatcccataacttaaagtataataaaaaaaagaaaagaaaattatttcttgggttctgattaaataatagtgaatatttacaaatatgtttataggactaattctcaagttttaaaacctttaaaatatatgccaacactgaaagacaaaaatcaaattttgaatctgtagcaatcacacaattcatgtttctgtagatagtgaaataaatccacactagatctaaaaatgtagaaggagcaagtcttatactaaacctcaataatatttgcattttgggggggcggggaaatgtgaaggaagaataattctggtgatagtcaaacactgccattttttaatttacatttttctaaatttaagcatattggcatgcacatttttggtaggtactgccctcctgccccctacagcctttccttgttcttggctatcttcctttctatgtggtgaagtgggaaggatagttcttgtatcatctctctgaaacacttgaaaattttgacccttccttttttcagggcaaaaataaaaattcttttgctttggcttctgcactgtcattctatctgtgttacctccttctttttggccatttattcccattgtcatactcttaaactcctttttcttttcctatttcttaactcatgatgttgttcaagattttattcccagtcttgttttctcattgtttacctcgttctccctaaaacctttcatttgactcgtgtttctgtacctgtatgctgtagactcaccaatctacattttcagttgtttgtactgacctccatattcacagttccagccatcactgatcatctttatttgaatgtctcataggtacatctaacgcaacataacaaaagccaaactcagtatctttgcccgaaatttgctttttactcctgaatttccctctttattgggttgcccacatcagatccctagtgatcattctagattctttcctctctctcaccctctattttcagttgatcatttagacttcccatttttatctcacatttctcaaatttactcctagcttctatccctgtcttagttaatatcatttagtgctggaacaacgccctgcctgctactctatttaaatgtgtctacctgacgtagagaaaagggtctttttttgaaatgatagtctcatgaggtcattcccaagcttaaagctgttcattgtctccccagttcagagaaaaacgaattgttcctcggcatgacacatacagtgtccatcattgacactctcatgcctctctgattttaaatttctggtattccttctcttaatattgtgctgcagctttccttgaataattatagctctctcttaccaagcatgctatgctgtctcaatctctttgctgtgcacaagttgtcctctctgcctgatgtgtctttcccatttggtggcctattcatcacctgtaagatgtaccttaaaatagaatatcatttctaaatatttataaattatttctaaatattctaatatttagaatattatttcttgatgcaagagttactttagtagataaaatagttcatcttcatttctgtagtaagtcttatttttagcatcctcacataagtaatttagcaggagtgatgctgtcctggtcatggaagctctaaatatcttacaatttatttacctatttattcatttactgatttgtttgtttgttttattactttatttactccacaagtaattatcaagtatctagtatgtgtcagcactgttctaggtaccggagatatataagtaaacaaaatagataaaaattctttgccttatggagcttacattctaatgtaaggtgataaacaataacaaaataaatatgtgtacacaatagtatcaaacgtgataggtgttatgaagagaaataaagcaggagagatgtgtagggagtacatgggaagaaatattgcagtattaagaagggttgccagaaaataccttatttagaaaatggcatttgaactaagacttgaataaactaagcaattatgccatatctaaagaaaagtgtttcagaaaaagcaaggagaaaaaatataaccacggggaaaatagattaagaattttgagctaaaggagccacgttttagttttgatgatgagttttgggaaaatctaaaaaccaaagaagactattgtgacatctgtcatttgttgtgtgtgtgtatgtagatctgtagatatatgatgacatatgtagatgtttcattactgttttagtaacaataatgtcatttcttttaaaatagctttgtgtaagcctgggcaacatagtgaaacctagtctctacagaaaaaaaaaaattaattagctaggtgtggtggcactcacctgtaaccccagctactcaggaggctgaggtgagatgattgcttgagcccaggaagttgaagctacagtgaaccatgattgcaccaccctactccagcctgagcaacaaagtcagattctgtttcaaacaaatacacaaacaaaaaatagttcagtgtaaggacttgtccacgtaaaagttcgtttttcttgttgttaagagggagtctcgctctgtcgccaggctggaatgcagtggcgcaatctcggctcactgcaacccccaccttccggattcaagctattctgcctcagcctcctgagtagctgagactacaggcacgtgccaccatgcccggctaattttagtattttttagtagagatgggatttcaccatgttggtcgggtcgcaaactcctgatatcaagtgatctgccctcctcggcctcccaaaatgctgggattacaggcgtgagccaccaagcacagccagataactgattttataagacagttatgttgacctagtgtatcacatgtatcaaacctaggtttaaatttaatccagataggatctagactttttagaggtatttctgatacagaatcacttatttttagttaagtattcaataaatgaccatgttagacttatttctcctctttatagttcagtgtaaggacttgtccacataaaaattgagtgccactgcaccccagtctgggcgagagagcgacactccatctcaatacatgcatacatacatgcatacatacatacatacacacagtcttctgttttctgggacctaatatttgctactcaacattctataaactttactttgttttaaatatatagtatatatggtatattcagagataacattatctaagcatctaactttttcagaatgcaagaaaataattaaaactcaaattctagacaggctaattgtccattccagagttcttccaagttagaagtggaacagtatccactaggatagtatttcagtgactcaaaaaggaaccaaacaaataatttttttgcatgaatgcattaaatgcgtactaataatatcttgttacaaacagaattctgactaacaaaccctaatgaaaatacaaagcctaacatatacctcttcttatccccaaagggattattttactattcataaatacttgtatttttgtaagcccagtaatctttcttttgagaaaacaaaacttattgtgtaacatatcttacagttataactcaaagcacttgtttttaaatttaattcataacacagaataaaatatctgggctactgttaaaactaaagattcctaggcaaatctctatgattcagtaactctagagttatattcaggggcttgcatttggaaacatagctaattgtagtaggcattcctcacatttaccaatatctctggttatcttcacttctaaacctcaaaaagttgcagtttccaaatccttgctgtggccaagaggattgctttagctgatgaaatgtgataagtggcattgttcacttccaggtggatgcatttaattgccttgctcttcctctccaactcattcatttcccaacatagcaattgtgctcaagttcaaagcatcctaaaataccgccaaaatatcaaagattgctaacctggagaattatctggacctacagcagacctggcttttatgagatatgaaatcttgttctgttaaatcactgtgatttgggaagggggatgatttttactatagtataacccagtcaagttgtcgttgaatttccatgtgtattaaaaacattaggaaggcttgataaaacactgcttgctagactgactcccagtttctgattttataggtatagttgtggcctaataatttctttttctaataagtttctgggtaatcgtgatgccattagtttagtaactccacttgagaatcactgatctagccaatcttgaccaatatacaaattttcatattttgaaacaaattgacattaagtcaaacttatcaatatgataaacaaaggcatcattttgtatgtaaaacaaatttaaaatgtttaaacaagcataattttttagtgatttaacactgacaaaattattaatcacttcttaaaaacacttaattgtctgaacttcaacactgagtagcaattattctgctaaatattcttgtccttaagagtattcaaaatggttttgaattagctttaatatgaaggaagaacagtcccctgtaaatacagtaaaaattgtgaagtataaattgagatttaaaacaatctgatattactagaatgttttataatatccatttcatataaatttaaaaatagttttactttttaacttttaaaaaatgtacaaaaagtactaattaattacatgtgcaatgattctgacttgtcatttaagtatttttttcaaattccccattccactctcacaatgaactttttatccaattgaaataattgagttggcattaaagaaagaaaattaagtcagctcttaaaatcttaacactaacttgttaattaccctattaataacacaatgaaaaatgacaagctgtaattccttttccaaaaatatggctgaaggtcagagagctgtcttgctggcatattgagagaccgaaaattacaaatgatgagcttttttttcttttaaatatcatcagatgccattagaaattcagcgaagagactagatcaatatttaaaatataattttaaacataattttcctattattaaagaaaacaactgctatatattaggaaataacctagcaaagatacttgtatttgtgtgttaagaagacaaatctaaagggtttccaaacattgtccaggtctgagcttttacactattgaaaaaggattccgtgtgcttttagcctacagcaaagatcaaaaagcattcacagagcctactggcaaaccagagataaatagaatggttttctctgccattaaacaataattcttgaaaatgacttttttcttttatgtggggtagagtaaatccaaattatgcaggacaaagtttacatgcacagtaagtgatctattgtggtattgtttgcatttttcttggtacagtttaatttattgttgtaactgcttcgctatttaggagaatagaattggttaccaaagacattgtaaaactgttctataatactgtagtactcatttaatatacatatataaatagttttactttttaatttaacttttaaagaattttgcaaaataaaacagaattctgtttcagagtagagacacttaaacatttgtagttttcttagaacatgtataacaataccataatcttgtattcagatttttaaaatttgtaattgtggtaaaatacacatacaatttgccatcttaaccatttttaaatgtacaattcagtagtgttaaaaatattcacattgtagtgcaaccaatctccagaacttttttattttgcaaaactaaacttttgtatgcactaaacaaccattctccatttctctttccatagtctccagaaaccaccattctactttctgtttctatgaattaaatactctagatactcatagaaatcgattatacagtgtttgtctttttgtactggtttatttcacttaaaatagtattttcaaggttcatcgatgttgctgtgttgtaaagtgtcgaaattttctttgtttttaaggctcaattatattccattgtatgtatgtgtcacatattattcattcattcatcaaatacttgggttgcttccaccttttagctattataaataatgctgctatggacatgggtaaacaaatatctctttgaggccctgttctcaattcttttcagtatatacccagatgtggaattgctggatcatatattacttctctgttgaactttttgaggaaccatcatactgttttccataatggatataacatcattcctaccaacagtgcacaagagttctaacttatccgtatcctcactaacatatatatatattttaattgtactcatgttgatgggtgtaaggtgatatctaactgtggttttgatttgcatttccctcatgattaatgatgttaaacacatttctatattcttattgatcatttgaatattttatttggggaaatgtttaagttgtatgctgatttttttattttagctgtttgattcattggttgttgagtttcagtaattctttctatattctggatattaactgactatcagatatattatttgcaaatgttttcttctattccatgggttgctttttcacgttgttggttgtgtcctttgatgcaaatttttaaatttcataatccagtttatttttactttttttaaacctatacttttgctgtcatattcaataaatcattgccaaatctaatgtcatgaagattttcccctatgtttttttctaagggttgtatagttttagatcttacatttaggttttttatgttttttgaattaattttttttctatcttgaagagtaagagtccaactttattcttttgtatgtggatatccagtttccctatctctgtttattgaaaagactattcttttgtcatttattgaccacatatgttagagtttattgttgaaaatgaaaattattttaccacatatgtgagagtttatttctgagctctctattttattccattggtttatatgtctgcctttgtgccagtatcatactgttttaactagctttgtaataagtttgaaatcaggaactatgagatctccaactttgttcttttttttttttttttttttttttttttattatttttttttttttattatactctaagttttagggtacatgtgcacattgtgcaggttagttacatatgtatacatgtgccatgctggtgcgctgcacccactaatgtgtcatctagcattaggtatatctcccaatgctatccctctcccctcccccgaccccaccacagtccccagagtgtgatattccccttcctgtgtccatgtgatctcattgttcaattcccacctatgagtgagaatatgcggtgtttggttttttgttcttgcgatagtttactgagaatgatggtttccaatttcatccatgtccctacaaaggatatgaactcatcattttttatggctgcatagtattccatggtgtatatgtgccacattttcttaatccagtctatcattgttggacatttgggttggttccaagtctttgctattgtgaatagtgccgcaataaacatacgtgtgcatgtgtctttatagcagcatgatttatactcatttgggtatatacccagtaatgggatggctgggtcaaatggtatttctagttctagatccctgaggaatcgccacactgacttccacaatggttgaactagtttacagtcccaccaacagtgtaaaagtgttcctatttctccgcatcctctccagcacctgttgtttcctgactttttaatgattgccattctaactggtgtgagatgatatctcatagtggttttgatttgcatttctctgatggccagtgatgatgagcatttcttcatgtgttttttggctgcataaatgtcttcttttgagaagtgtctgttcatgtccttcgcccactttttgatggggttgtttgtttttttcttgtaaatttgtttgagttcattgtagattctggatattagccctttgtcagatgagtaggttgcaaaaattttctcccatgttgtaggttgcctgttcactctgatggtagtttcttttgctgtgcagaagctctttagtttaattagatcccatttgtcaattttgtcttttgttgccattgcttttggtgttttggacatgaagtccttgcccacgcctatgtcctgaatggtaatgcctaggttttcttctagggtttttatggttttaggtttaacgtttaaatctttaatccatcttgaattgatttttgtataaggtgtaaggaagggatccagtttcagctttctacatatggctagccagttttcccagcaccatttattaaatagggaatcctttccccattgcttgtttttctcaggtttgtcaaagatcagatagttgtagataagcggcattatttctgagggctctgttctgttccattgatctatatctctgttttggtaccagtaccatgctgttttggttactgtagccttgtagtatagtttgaagtcaggtagtgtgatgcctccagctttgttcttttggcttaggattgacttggcaatgcgggctcttttttggttccatatgaactttaaagtagttttttccaattctgtgaagaaagtcattggtagcttgatggggatggcattgaatctgtaaattaccttgggcagtatggccattttcacgatattgattcttcctacccatgagcatggaatgttcttccatttgtttgtctcctcttttatttccttgagcagtggtttgtagttctccttgaagaggtccttcacatcccttgtaagttggattcctaggtattttattctctttgaagcaattgtgaatgggagttcacccatgatttggctctctgtttgtctgttgttggtgtataagaatgcttgtgatttttgtacattgattttgtatcctgagactttgctgaagttgcttatcagcttaaggagattttgggctgagacgatggggttttctagataaacaatcatgtcgtctgcaaacagggacaatttgacttcctcttttcctaattgaataccctttatttccttctcctgcctgattgccctggccagaacttccaacactatgttgaataggagcggtgagagagggcatccctgtcttgtgccggttttcaaagggaatgcttccagtttttgcccattcagtatgatattggctgtgggtttgtcatagatagctcttattattttgaaatacgtcccatcaatacctaatttattgagagtttttagcatgaagggttgttgaattttgtcaaaggctttttctgcatctattgagataatcatgtggtttttgtctttggctctgtttatatgctggattacatttattgatttgcgtatattgaaccagccttgcatcccagggatgaagcccacttgatcatggtggataagctttttgatgtgctgctggattcggtttgccagtattttattgaggatttttgcatcaatgttcatcaaggatattggtctaaaattctcttttttggttgtgtctctgcctggctttggtatcagaatgatgctggcctcataaaatgagttagggaggattccctctttttctattgattggaatagtttcagaaggaatggtaccagttcctccttgtacctctggtagaattcggctgtgaatccatctggtcctggactctttttggttggtaaactattgattattgccacaatttcagagcctgttattggtcgattcagagattcaacttcttcctggtttagtcttgggagagtgtatgtgttgaggaatgtatccatttcttctagattttctagtttatttgcgtagaggtgtttgtagtattctctgatggtagtttgtatttctgtgggatcggtggtgatatcccctttatcattttttattgtgtctatttgattcttctctctttttttctttattagtcttgctagcggtctatcaattttgttgatcctttcaaaaaaccagctcctggattcattgattttttgaagggttttttgtgtctctatttccttcagttctgctctgattttagttatttcttgccttctgctagcttttgaatgtgtttgctcttgcttttctagttcttttaattgtgatgttagggtgtcaattttggatctttcctgctttctcttgtaggcatttagtgctataaatttccctctacacactgctttgaatgcgtcccagagattctggtatgtggtgtctttgttctcgttggtttcaaagaacatctttatttctgccttcatttcgttatgtacccagtagtcattcaggagcaggttgttcagtttccatgtagttgagcggctttgagtgagattcttaatcctgagttctagtttgattgcactgtggtctgagagatagtttgttataatttctgttcttttacatttgctgaggagagctttacttccaactatgtggtcaattttggaataggtgtggtgtggtgctgaaaaaaatgtatattctgttgatttggggtggagagttctgtagatgtctattaggtctgcttggtgcagagctgagttcaattcctgggtatccttgttgactttctgtctcgttgatctgtctaatgttgacagtggggtgttaaagtctcccattattaatgtgtgggagtctaagtctctttgtaggtcactgaggacttgctttatgaatctgggtgctcctgtattgggtgcataaatatttaggatagttagctcctcttgttgaattgatccctttaccattatgtaatggccttctttgtctcttttgatctttgttggtttaaagtctgttttatcagagactaggattgcaacccctgcctttttttgttttccattggcttggtagatcttcctccatccttttattttgagcctatgtgtgtctctgcacgtgagatgggtttcctgaatacagcacactgatgggtcttgactctttatccaacttgccagtctgtgtcttttaattgcagaatttagtccatttatatttaaagttaatattgttatgtgtgaatttgatcctgtcattatgatgttagctggtgattttgctcattagttgatgcagtttcttcctagtctcgatggtctttacattttggcatgattttgcagcggctggtaccggttgttcctttccatgtttagcgcttccttcaggagctcttttagggcaggcctggtggtgacaaaatctctcaacatttgcttgtctataaagtattttatttctccttcacttatgaagcttagtttggctggatatgaaattctgggttgaaaattcttttctttaagaatgttgaatattggcccccactctcttctggcttgtagggtttctgccgagagatccgctgttagtctgatgggctttcctttgagggtaacccgacctttctctctggctgcccttaacattttttccttcatttcaactttggtgaatctgacaattatgtgtcttggagttgctcttctcgaggagtatctttgtggcgttctctgtatttcctgaatctgaacgttggcctgccttgctagattggggaagttctcctggataatctcctgcagagtgttttccaacttggttccattctccacatcactttcaggtacaccaatcagacgtagatttggtcttttcacatagtcccatatttcttggaggctttgctcatttctttttattcttttttctctaaacttcccttctcgcttcatttcattcatttcatcttccattgctgataccctttcttccagttgatcgcatcggctcctgaggcttctgcattcttcacgtagttctcgagccttggttttcagctccatcagctcctttaagcacttctctgtattggttattctagttatacattcttctaaatttttttcaaagttttcaacttctttgcctttggtttgaatgtcctcccgtagctcagagtaatttgatcgtctgaagccttcttctctcagctcatcaaaatcattctccatccagctttgttctgttgctggtgaggaactgcgttcctttggaggaggagaggcgctctgcgttttagagtttccagtttttctgttctgttttttccccatctttgtggttttatctacttttggtctttgatgatggtgatgtacagatgggttttcggtgtagatgtcctttctggttgttagttttccttctaacagacaggaccctcagctgcaggtctgttggaataccctgccgtgtgaggtgtcagtgtgcccctgctggggggtgcctcccagttaggctgctcgggggtcaggagtcagggacccacttgaggaggcagtctgcccgttctcagatctccagctgcgtgctgggagaaccactgctctcttcaaagctgtcagacagggacacttaagtctgcagaggttactgctgtctttttgtttgtctgtgccctgcccccagaggtggagcctacagaggcagtcaggcctccttgagctgtggtgggctccacccagttcgagcttcccggctgctttgtttacctaagcaagcctgggcaatggcgggcgcccctcccccagcctcgttgccgccttgcagtttgatctcagactgctgtgctagcaatcagcgagattccgtgggcgtaggaccctccgagccaggtgtgggatatagtctcgtgttgcgccgtttcttaagccggtctgaaaagcgcaatattcgggtgggagtgacccgattttccaggtgcgtccgtcacccctttctttgactcggaaagggaactccctgaccccttgcgcttcccaggtgaggcaatgcctcgccctgcttcggcttgcgcacggtgcgcacacacactggcctgcgcccactgtctggcactccctagtgagatgaacccggtacctcagatggaaatgcagaaatcaccgtcttctgcgtcgctcacgctgggagctgtagaccggagctgttcctattcggccatcttggctcctccccccaactttgttcttttttaagattgttttggctagtcaggatttcttgagattctatatgaagttttagctgagtttttctgtttctgcaaaaaattttattggaattttgatagagagtacattaaatctatagatcactttgagtaatgtactcatatttttaaaaccaaggaaatttgagttatactaaaatatactttataaataaaacaacatttatttgtcaatttattagtctatttagtagccaatcaactaacatagattctttctatagcagtacatttgctgcttcagttagggtccatcacattctttaatttgagctcacttccttatttgtctgaaaattattttttctttataaactttatatactgatgacatatacaactatataaagtaatatcttatcaagcacttccttggccaaagaagaaccaaatgtgaataagatgttttgattctccaaatacttaaacactagtgttacaaataaattacagtacagtatgataaatgctaaaagagagttatataaaagtgttatggcaaactggaagttgaaatcaaggagatccagttggttggagaactaaacagagatgacatttaaactgggtctcaagtaatgttaagagtaggtaagataggaaatgcaagtgtacagagctgtgaaatggtatggtgaactggtagcatgatgaaacatctactgaggttgatacaccagacatcatctagagatgcccaagaataaagacaaatggatcaaaagagatcatgaagggactggcaagactgaaaatcagagcatataaccatataagactaaagtaggttagtcaccagcagccctgtagaagaggctgtggctggaatttgaaattattaaatatcactggacaggttggaggcataaataggttccaaagaacagtcttgatttaggcctcataatgctgcttaccaagaatcaattaactttttaggaaaaagtgatataatgaatttttgagtatggaatttttaattcatataatgtatttagaacattaaaaggttattaagttttgtagttattggtgctatttaccaaatatatctagctctggtctcaggcatagaacagaattgcattttctcaccctctttgaggttaggcaaagccatgtgattttcttttgccagtgaaatgtgagcaaagtactgaaatatttcttggtgactgtttcaaaagtcagttatcagtttgtcacattttcttctccatgctatagtaatgatgagaacatgattcttgatggaggtactggagtaactgtaaggtgcaaagccaccctaccaatccatgctagacaaacaataggaacggcaataaacttgcctgttgtttagcctctgagacatgtaaacataacttaccctatcctgactgtacaacaagtaagacataataatggctgtagaaagccttgataacagaataagaagaaaaaaaaaaaaactaaaatcaaccataatcttacccaaatgagtcattgtaactatttttatatttacctcttaaactatagtgttacaaagaagcttaattcatcatgtcaattatttacttaattgtgacagatgtttactctgctaaaggtatatgctgttgctctctctctcaggagattagcttccctgtcagtagctattgtgttataactagccatcatcaatttttctcttaagtgggaaactacaatacataacaaggttgttttgaatctcatatgagacaaggtatataaaataagtggcacatagtacgttaaacaataaagatgggagaggccgtttgtctttctaaaggtttgcttatcaaaattttaaaatacttgataccttcaaaatataaaccatttttgttcaacaaaactaaagcataatgtaataattctccatctcccttaagcaagtgtatgccatttgtcattttctttaaaaataaatgaacttgttcaattagttgaaaattttcttttatagatctgattttacaagttgatgggtttttattgcagcattatgtaaaaaagcttgaactttattgctcttgattagtccttatccttctaagaattttaatggtaatagaatattttaagatgcatcagtgcacatttatgttgaatgttagtatcctttctgctcttcactgactaacactacagttaataataaaaatttatctttatttttgaaggcttattatgcatatatgatatttatacatttttggtgataaattctatcgccacctagtgctttggacaacattttatatttctgccatttctttttgcattacattaagatgtgtaaactgtgactgcccattcttctcataagacttttctctccccagtaagcttacttttctctccccagtaagctgttccacaagggcagagaatgcgttttctttagaactgtgtcctcacctcctggatcagggcatggcttgtagtagatgcttaatgcacatttggggagtgaactaatagataaatactatacagttcagagtccaataaccatattctgacacaactacatcccctacttggattttaaaagagaaagtttttgtatcttcttgatgatctaattataatgctgtgcatctagtttagccaggacaagatttacatacgttgctgaatttagtaaattcttacttcctggacttcagataaggtaaaaagtaagcataattacaaagggcaggaaaaacccttagttatgaaaatatgtattatcttgactatggtaattatatcataatgtcaaagttaatcaaattttacactttaagtacatatattttagtttactttaattagaataaaattgaaaacaaaagccaaaaaagtaagaataacatattaaattgctttatattacaacagcaatatttctgtaaatattcttcctctacatttcaaaatttgcaaaagatatcaccacaggcaattgggcattacttttgagattctttgtcagtggaatacattaaatctcccgcctgatagagaaattaaaactgccacatttctgtctctgctagcatcatcttgaaatgttcatccctcaaacaggaatagatggaaaggagaggaaaggagagatgaacagagtttggagaggaaattacctcattactatgagcacagagaagagagacaagaaagagatataaaacatgagaggtaaacataataatcatcatgacaacaacagctattgaaagctcgctgcatgccagtaacagtctaaacacttagcatgcatttctcgtttttctgttttcatggcaactctgtttagtctccctatataaaaaaatgtaaaatctgagtcttaaagatgttatgaaacttttctgagggaaagtacaagtgtcagaataaggatttaaacccaaaatgttgaatctaatagtcaggttcttcactgaacgctatacctgttcataacagacacaaaatgtaaaaaacaaagaggtaaaacagaaagaaacaagcttctatgtgtattggtagatgaggagagactttgcagctgatgctaaacaagaggctagggtccacagctatctacacatctcctcaagacagagctccactgtagacagttaactccaggtagacagaagttaagacatgtggaaaacattaaatagaagcaattgtttgctataatctttgccacttttgcactgtatgcatttttgaagatccaaggccttctcccaggctatagaagtgcactttaagccaatattttgttttatgagatataagaaatcacagccatataaataaggcacaagcagagatgagtaaatggtatatagtgtctccagttttagaaaggatgcagattatatctgaaccagcataatgtcactacaagaaggatgcataatgtcataaaaatgtacttcatacgactcagttatttgtattttttatttatttgtttttaactaaagatgaatagcctctgccatattttaaaagggcaggcaatataaagttcaatattagaaaatgtacctaaatgactggaaaacacatcttatgaactagtatattaatcattcagtgtaggaagcagaaggcaacattacatatcactgtgatgtgctaagtgctagtctcaaatattcatggcttaggcaagagtttatcaaccttggtgctgtttagttgaagtcatggggggctattttttgtaaaatgtttaccagcatccctaacctttacccagtagatgttagtagtagttctcatccccagttgtgacaattaaaaatatctccagactttttgccaaatgtcccctagaggcaacatcacccctgatggatcactggcttcatttgagtatatttctaatcattatttttcattaaataattatgtttcagacttgcagtaaagatatgctgtaactttagatatgatttagaagtctatatcttagaaactactataaatagactcagtacaattggaagtggaattggactaccgatgattatattcattcacataaccatttgttaaatacacactaaatgcctgtcactgttccaggttctaggaatacaaaaataaaggacacatttgagatctgcattacaccaaaagtgatataaactgtttattgatccagattctccaagatctacttttgtattctattaatttaatcatcagaaaccatgaattgttaggccatattaccttacatctatgtagaaatatttttcctaagttatcatggtttctctgggaaatgaatataaaaatttcctttgaaatattttttagttttttttaaagtgatgagccaacataccatgcaccatgctattcactgtcttcaatccaaataacaatttacatgataaactaaagattgaattcaaagcataaagattgtttatcaacccttgatttcatttatttatcatttgagataacaattctactttttaaattatttatatcgttagagaattagagaagaaactatatgtattagtctgttctcatactgctaataaaaagatacctgagattgggtaatttataaaggaaagaggtttaatggactcacagttccacttggctggggaggcctcacaaacatggtggaagataaaggaaagacatgtcttacatggtggcaggcaagaaagcttgtgcaagggaattcctatttataaaaccatctgttcttgtgagacttattcactaccacaagaacagtatgggggaaactgccccatgactcaattatcttcacttggccacacccttgacacgtggagattattacaattcaaggtgagaatatgggtggggacagccaaaccatatcactaaatgttctgagtacttaccagaatcattctctccggaagcttccttctaactgtgctctctcctctcttcctttcaagaaggtagtttaggtcctgggataaaaacaaaagacaaacaagtgacataatactagctccagaaactgtgatagcatattttatttccatcacctcaatcccctcaggaagtacagaaaactcacagagagcattgaagaagtaaagaagttatgcaacgtgcccaaggtcacacagtgcttggtacccatgtttgactcaatcttaagtccatgcttttgtcatgccactgcttttcctctggatcacgtgggttggagtaatattaaacatgtttaacaagtgatcttacagacagcaaccaacagctcgtacatcatagagatgtttactagctgataatcagctttcacccttctagaagacccagtctacatacaagtacaagccacatttaatttcctacctgtattctcataaattagtcgaactgagtcaccttcctaaactctggataccctccttataataatcttggagatttaagattatagcaaacaggtaaatgagtttataaaatgttcaaggcaccagcagtgttactgtgcttcagggtagagtcagggaaattagaccaggtgccagctaagagtaaagggagaaagcccagagtatgattctggatcactgacaactgatgctgtgggctgaggaagggaaaggtgcagaagggtgaaagtgggtggagtttggtaccaagtctgagcagaaactacacattaggactgcaaaggagatcagtaaaagccagatgatccctttttccatctctagatcttctagaagtaaatttcacacagttaaggctcattaagtgctcctagacaagctctttgcaacagggcttcctggggagtccagacaaattactgtttcctttgaccaaagcagcctgaaagcaggttggacctctttattagaatgaacttaggtacttaaattctcctttccctttcagagcacataggatttttctgaccataactaaagtgcaaaggtttaaaatactaataattccaagaaaggaaacattggaaaccaattagtaaggatatccatctaaatgaccagaaagatattttccactgtttggctagaaggagaggaaaaaggcgtgctgaccacttggtttctgaagcaccagaggggtcaccaatgtgaggaaaaggataagagaggggaatcttagagcaaagatcaactttaaccacctccttttcagtttaagtctccaaattcccctgtcaaagaatactcagtcgacaaagagaagctgtaccaaaaactgtttcatccataatcagctgtgcccagaaacagctgatgcagggagtgaggtgcattagcagaaagtcaggtcaagccccaagcaaaagtgatggttggtgagcccagggtctctttgaggagactccagcctgaacctcccattatctgccctccctctttgctccattagaaataatcactcctaagtggcccattatcaatgccagcatgattttttcacatttgctaaaagcttttccctttttcttttgtttctaaggaactattttaattccctctcccctttattttgcagttaactgacttgaaaaatatctgatttgaaatggggcttacagaccaatttcttctttccttcagtacatcccacgacccattccccaccccctagcacctagtaacagccatcgcatatgcattaaacaaaagacccattagtggagcattgttttgcacttctgcagacaaagaagaaagagacctccagttagaatgaactctttttgtatttctttctttttctttttttttttttttttggcaacaaatagctttcttttaaattcagaaatgaaatggaattgagaccctaaattgctctcatctaaaatgtttcactctcatcttcactttcctagattatgatcaattttccccagaatgaataattcaaattgagcccagtcttctgaatccttagaaaaaacaatgccttagcattttgggtctattctactcacttatcacttggcacattttgtctggtactggcagatattctttttgtaacatataatttatttttccaaatggactacaagcttctgaagattaaagaccatttcattcattcattcattcattcaacaaatgtatttgagctcttaccatgtgttagacatgtgctaatcacttgcaatacagccaagaactaatcagacaaaaatccctgcctccctggagtttatattctagtggagggagacagagaataagaaatcagtgtcataaatatgtaaattgtagagtatgttagaaggcgataagtgcaacagaaaaaaatagagcaatgcaagaggaatctgaagcttaagggagggctacaattttaaatagggtggtcatgggggatgagagagtaagccatgtggataaacagaagaacattccaggcaaaggatatacattaaagtgagaacttaaaaaatggagttgccatcagctgactgggaaggctgtgtttggatatgttaagttttgggtgcctactaacgtctcactggagatctgatggagtaggcagttggatataggtgtctgaagatccagtagggtctgggatgaactattcatttgagagtagttttaaaaacatgaaattggatgagatcatcacagaagtgagtataaacaaagaagactcggagatgacaggaaatgatctctaagataagaagaaaactaaaaatgtggggtaccctgaaagtcaagtgaagaaatcatgacaaagaagcagagaataatactgctggtatgtcatgtaaatgaaggctgaaaattggctgtggaatttagcaatctggaggtcattggcaatcttgccaagaaaagtttccgtggagtgatggaggttaaaacttgattagagtgagcttaagtgagaatgcaaggtgcagtccaccagatgtttgtgttccccctaaattcatattgaaactctcatcccagtgttattgcacttagagatggggcctttgggaagtaattaggtcatgaaggtggagccctcatgaatggaattagtgtccttaccataagaggccagagagctagctcactctccttctatctgtgaggatacaaaaaggtggccctccacaactaagaagaagattctcaatagaacctgatgatacgggcatcctgacttcaaactttcagcctctagaactgtaggaaatatctgttgtgtataagccatccagtctatggtactttgttataccagcctgaactaattaaggcgggggcaaggatttgatgattatatatacagacaacaatttttagaatattttctacaaagaaaagcagagaaatgaagtgatagatggcaggggaattggtgtcaagataaaacttaattaaaattaaataaataacagtatgtttatattctgctgggaataaatcaggagagaaggaagacttaataatgcagtattgagagaattgtgaccaactgtaacaatacaaaggaaatgttattttttatagcaggtagcaaagcggtttcctcaaaggagagaccctatttgtgatttctttcataagcctgcttagtggataggcctccaggacttctttgtcagctggtgcttaagcttgaggagttgaaatgcgtttgtgtttgccataggaaagaggaagagaactggacaaggcatgaggggaagaagactacatatcacgtagccaagaagacagatgtggggagtgcattgtgacttgtgatataaaccttctcctctgtctctctaccttttcaccaaaatctacacttgtagttttgctaatggaaaatgtcaagacgtgctgaaagttgccttgaggttgtaaacagatttaaagagtgaaagtagagcctgcccatggaaggacaagtcatgggggttacagagtggactctctctgacagacttctgttattattgcttgccccaggcagctctcacttattttgtatcaaattatcccctcagaacgtcatacctgtctcattctacaaagtcttccctggcaacacacactctagactcctaacttacttagctacctggtcttgacctttggagctgtcatcctatgcctatataatggcccagcctctgcttactcctcacccccaccctgcgccctcactccccaccacctgatctctcactaccatgtttcctccttgatcaatgccaggcaaagtgaactatttgcagttccccaaactcgtcatgctgtctcattactaacgtctttgtgcattaagttccctctgcctgagaatttttctactctttcaagagtcaagccctcctctttgctgatttaactcagagtcctttaaaattttgtctaaaacatctttattttctttctttcttttttttttcctcacttgttgcccaggctggagtacagtggcactatctcagctcactgaaatctccacttcctaggttcaagcaattctgcctcagcctcctgagtagctgggattacagttgcctgccaccacgcctggctaaatttttgtagttttagtagagatggggtttcactatgttggccaggctggtctcaaacacctgacctcaggtgaaccacctgcctcggcctttcaaagagctaggattgcaggcatgagccactgcacctggcactttaaatatctttctagtggaaaattataccggcttatgcacttctctcatggtaatacttttcataatgtaccacaactgatggtttattttctgtctcctcgtttaaactgtgaggtctctatcatcctggtattctttgtacctaggatagcatctacttcacagtagctgcctaataaatatttgctgaaaactgaataaacatctaatgtcaaaagttgtgaataccaggtaacttagcataagccttgaccccatatgagtggggcttagagttcatctgctgctctaaaatcaaggtcactgtatctagtagtgaccccctggtactcacaactatataaagatacaactgggatcgtgatgtttgttcctattttattttactttttttccccagtcctgtattagaactagaagctgattggtcctgaatcacaacgaatttgactggagtcctatccttcagattagttcttctgatgtctgcttctatacttccagctaatagagcctttcccaaggtcaggtagttggcctactttctctagagcctgaatggctaggagactgaggttgcacagcatctgctgctatttgactcttttctccctactcctctccccattctgtaatatgttcaataccagcaccagtctgtaataaggcaaattttatgactggatttaggatcccatttgggaagaagtattactgtactattgcattggttttctatctcaactaggctacttccaacttacacttcacccgtgtcccacccacccaagatgtcaggtacatctcacagctgagacctgggttattgttccactttaacctctatgccagatgtctacctgctgaaccattttgcatgctcaacccactctcctatccacctctgctctgaaatctttcccaattcccactcttcatcttgcatgtactactctcagctcttccttgtgttaacaacttagtgtcttttactgaaattaaaaattttgtcaggaagtttgcagatgacatatatatggggattgagtgtcctggtacaactaactttgacctttgaatactataaaactatagctgtggaactttgtatgacaaatcagtgattcttctagttctggttcccaaatgactaataaaaagttaacaattttccacatttctctgattttaaggtactcatttaatactcattcctatccctaaagctcaagttcataggtttcctccaactgtctaggaagattaaatcacatgtgtaaatgtgataagagtattttaggtttgaacacatggattgcagaatttgtatgctggccagaatttctggtggagtaagaattttttgtagaaatttattccacccatcatgtaaatggctaaattcttcttaaggcagatcattacctagatattttgacagatttggcaaaaagaaacaggacagcccaacctaattcaattaatcttaccacctattcttaagaacaattactcacaagaaaaatacagctgcaccaaagaataaaatccatacctgccacttattaaagtaattttcaatttgcttaagtctctgtgcctcattttcctgtacgaagaaaaaaaaccacttcctcgtagtaagttgtcataaatattatcaaatatcattctcaaaaatcctgagttgcattaaagcaacaataaatcatgaatggtatatttttattttctttttaaaatgtagaataaaacacaatggaccatagacatgtacttagggtaccaaccagtggacatgacaagataacataatgttgatagggaataggagtagggaacaatgtataactatctaaatgtgcatgggaaggggtgctaactagccctagtttttaggagttccctacagaattacaaggaccactgcttaatatcagttatgagagaggctgtggtatgcatcagcttattgtttgggaagagcttagtatgagatggacccttctctcatcttattaggactgaaaaattaagttagttgatttacgggaaagtggtgaagatttgaaaagtgatagatatgataaatggcaggctgggcatggtggctcatgcccaaaatcccagcactttgggaggccaaggtgggtggatcacttgaggtcaggagtttgagaccagcttggccaaaatggggagaccccatctctactaaaaatatgaaaattagctgggtgtggtggcaggtgctcataatcccagctacttgggaggctgaggcaggagaatcgcttgaacctgggaggcagaggttgcagtgagctgagattgcaccattgtactccagcctgggtaacaagagagagactccatccaaaaaaaaaaaaaagaaaaaagaaatgataaatgacaataagaaaggcacaagacaaaaatattcaagacaatagcaatgaagaaaatatttaaatgttctaaaaatattttggaataggtgtttagaaattaaaaaaaaatgatttatgcttaaatacaaggctagacttttcatttcagcaaataggataattctactgcccaaacatataggtagataatattcaacctttaccacaaatttagtagccattgtcattgttaagggcaacagtaaagtattttggaaacatttggaatttaaatcgccctttgatagttaaactgtgaaattaacacataatgaatatctatgaaaagttgcaaagctaccttaaaaaacacagaaagcttcccagttaaggctgtattacatctttactgaaggtaccaatataaccaaagaaagaagaaagaaaatgtccatcagaaagaggacttaagtcagacatttaagtttcttaaaagcagaggcttgcagaggaaaccaaacacaacacttctccaaaaattgttaacgggaaatagatccttaacatttactaccaataaggccagttatattgcactctggaggcaaagactaagtactatatttggagaaagacttccagggtttaaatctggctttgccatttaatagccatgggcctttcaaaataatatcccagatatcagtgttttaacttcatctgcaggtggggctgacaatatttcttcttcatagagttcatgtggataaaatacacactatcaataaatgttatctatgattattacatttactgagtgatattgataggctttgtgtcctcacccaaatctcatcttgaattgtaatctccttaattctcatgtgtctgggcagagacctggtggaaggggtactttgccttatggtgttcttgtgatagtgagttctcacaagatctgacatttttacaaggggctcttccccctttgctcctcacacttctctgtcctgccgccatgtaagatgtgcctcttttccttccaacatgattgtaagtttcctgaggcctcctcagccatggggaacttaaagtcaattaaacctctttcctttataaattacgcagtcttgggtggtatctttatagcagtgtgagaacagactgatacattgagccaattccctttgccctgatttcaaattaacattaagcaaccttcagattatgatatggtttcttgtataactcaagaaagcaatggccaatttgagtattggcacgcctggaacaggttttgtatttttattataaattaatggattgaatttctcctgttatattccagtcttatgatcttgattattatgagtctattatgttagcaatgtggcatatgtttgatagcaacccaaaggtcttttgagctaatgtcaagattcaaaaattcaacacaggttgcctcagttaagggtgtaaatttttttttcataagaaattctatttccagggaaataaataatagagaatgcatatagatacatggtagggcatcagtcaaatctaggatgagggggagtatagagagaattatccctgttcttctttcacttatgctgatagaggctaaaatgcaagataatctcctttctattagtaacttggactatttcaatataccctagtttaccaacccatccttagatatgcaaccaaagtgatctcttttttaaaatttattaatttatttattttattatactttaagttctgggatacatgtgcagaatatgtaggtttgttaaataggtatacacaagccatggtggtttgctgcatccatcaacccattgtctacatgaggtacttctcctaatactatccctcccctagtccctcacccccaacagaccctggtgtgtgatgttctccctctgtgtccatgtgttcttattgttcaactcccacttatgactaagaacatgcagtgtttggtattctgttcttgtgttagtttgctgagaatgatggtttccagcttcatccttgtcccagcaaagaacatgaactcatccttttttatggctgcatagtattccgtagtgtgtatgtgccacattctctttatccagtctatcattgatgggcatttgggttggttccaagtcttagctattgtgaatagtgccacaataaacatacgtgtgcatgtgtctttatagtagaatgatttataatcctttgggtatatactcagtagtgggattgctggatcaaatggttatttctgtttcttgatccttgaggaatcaccactctgtcttccaccaacagtgtaaaagcattgctatttcccacatcctctccagcatctgtcatttcctgactttttaatgatctccattctaactggcatgagatggtatctcactgtggttttgatttgcatttctctaatgaacagtgatgatgagctttttttcatatatttgttggctgcaaaaatatcttcttttgagaagtgtctgttcatatcctttgcccattttttgatgaggttgtttgctttttcctgcaaatttgtttaacttccttgtagattctggatattagccctttgtcagatagatagatagcaaaaattttctcccattctataggttgcctgttcactctgattatagtttctgtttctgggcagaagctgtttagtttaattagatcccatttgtcaattttggcttttgttgccattgcttttggtgttttagacatgaagtctttgctctgaatcatattgcctaggttttcttctaaggtttttatggttttaaatcttatgtttaagtctttaatccatcttgagttaattttgtataaagaataaggaagggatccagattcagttttctgcatatgaccagccggttttcccaacaccatttattaaatagggaatcctttccttactgcttgttttttgtcaggtttgtccagatagttgcttgcagatgtgtgatgttatttctgaggcctcgttctgttccattggtctgtatatctgttttggtaccagtaccgtgctcttttggttactgtagccttttagtatagtttgaagtcaggtagcagtatgccatcagctttgttctttttgcttacattttaatattgttatgtgtgaatttgatctcgtcattatgatgttagctggttattttgcccattagttgatgcactttcttcatagtgtcgatggtctttacaatttgttatgttcttgcagtagctggtactagtttttcctttccatatttagtgcttccttcaggagctcttgtaagacaggcctagtggtgacaaaatgtctcagcatttgcttgtctgtaaaggattttatttctcttttgcttatgaagtttagtttggctggatatgaaattctggatgaaaattcttttctttaagaatgctgaatattggcccccactctcttctggcttgtagggcttctgaagagagatacactgttagtctgatgggctttcctttgtgggtaaccagatctttctctctggctgcccttaacattttttccttcatttcaaccttggtgaatctgacgattatgtgtctttggggttgctcttctcgaagagtatctttgtggtgttctctgtgtttcctgaatttgaatgttggcctctcttgctaggttggggaagttctccttgataatatcctgaagaatattttccaacttggttccattctccccatcactttcagacacactaatcaaacataagtttggttttctcacattgttccatatttcttggaggctttgttcattccttttcattcttttttctctaatcttgtcttcacatttttttttattaagttgatcttcaatctctgatatcatttcttccacttgtttgattcagctattgatacttgtgtatgcttcatgaaattctcgtgctgtgtttttcagctccatcaggtcatttatgttcttttctaaactggttattctaattagcaattcctctaacctttttttaaggttcttagtttccttgcattgggttagaacatgctcctttagatcggaggagtttgttattacccaccttctgaagcctacttctgtcaattcatcaaactcattctcttccagttttattcccttgctggtgaggagttgtgatcctttgcgggagaagagacatcctggtatttggaattttcagcatttttgtgctggtttttccttatcttagatgatttatctacctttggtgtctgatgttggtgaccttctgatggagtttttgtgtggacctcctttttgtcaatgttgatgccattcctttctgtttgttagttttccttctaacagtcaggcccctctgctgcaggtcttctggagtttgctggaggtccactccagaccctttttgcttgggtgtcaccagtggaggctgcagaacagtaaagattgctgccagttcattcctctggaagcttcatcccagatgggcatctgccagatgccagctggagctctcctgtatgaggtgtctgttgaccgctgctgggaggtgtctcccagtcaggaggcatggggatcagggacccacttgaggaggcattctgttccttagcagagctcgaatgctatgctgggagatctgctgctctcttcagagccagcaggcaggaatgtttaagtctgctgaatctgtgcccacagctgccccttccctcaggtgctctgtctaggaagacagatgttttatctataagccctgactggggctgctgcctttctttcagagatgccctgctcagagaggaggaatctagaggggcgatctggccactgtggctttgctgagctgcagtgggctccagccagttcaaacttctcagcggctttgtttacactgtgaggggaaaattgcctactcaagcctcagtaatagcagacgctcctcctgcccccaagctcaagcatcccaggttgacttcagatggctgtgctagcagcaagaatttcaagccagtggatcttagcttgctgggctcggtgggggtgagatacgctgagctagaccacttggctccctgacttcagcccccttgccaggggagtgaacggttctgtcttgctggcattgcaggtgtcactgtggtaagaaaaaacactcctgcagctagctcagtgtctgctcaaatggctgcccagttttgtgcttgaaacccagggccctggtggtgtaggaacctgaggaatctcctggtctggtggttgtgaagactgtgggaaaagcatagtatcttggctggaatgcacttttcctcacagcacagtctctcatggcttcccttggctaggggagggagttccccaacccctcgcacttcccgtgtgaggcgatgccccaccatgatttggcttgccctccgtggactgcacccactgtctaactagtcccaatgagatgagctgggtacctcagttggaaatgcagtgccttctgcattgatctctctgggagctgcagaccggagctgttcctattcggccatcttcccagttaccaaagtgatcttataacaagaaaatttgtttatatcattcttaatttcttcagtgatttcacagtgggcagggtaagtatttacctaactcacagaatactccagcttcctcaccctcagaggtaaggcccaggcagtaatgttcatacattaaagtaaatctatgcccctggctgcagttgattataccaagggttaaaacagctgggccaattatattctttcttctagaaatttggaattgtgatgaagaaagattagtctcttccaattgctggactcagtagttgaatgatggctatgtcttctgtgtgaactgtgaagcagagaaagctggtctagttagaaagaaaataatgaaacagaaacactaagaagaacagaagtgaaagaaggtgacatcttcataggctcgcttctccttgtttctgtttctaaggacttactgaattgccacacttgagtttcaagaaactgcctagatttttctgtttaagtcaaattattttttagcttaatcctgaattatgttttaactgattgcaactatgaaactccttctcttggaaagtgcagtctaacatgatacccttcataagtgttttttaccagctactggtcagcctcaccttctactgtcacagcttctgcttgattccccatctctccaccaaacaccacagaagacattttaactttttatgttctcataccatggtgttttctatatgctattttctatttctacagtaatcacccatccttgtccacttgctaaatggttacccattctgaacacttctatcgtgctttggagattctcacattattgtacataagtcattgaagaaaaatgatttgcatatctgtctcaccaccaccaccctataatctcacaggtggtgaacatataccatttatattttttaatttcacttctgtattctcaattcaaaatacacaatatgtgctgtcatgtattcctgatacatttacatcttttaatcattcataagataacatgtatgttcaataagcacaactactaaagactttggggttgatgatattatttctgggacaagaagataaaataaaacctgagattctaaagagttacgttctacttggcattcccaccaggacataaaagttctgataattgttagtcatgagcccagcaacataaaacatcataagctctttcatcaatgtcaacgttaaatcatatttgatgtattaagtgccagtataaaaccaataacagcagcatcctgggacatagccagaataagagctgtgaaggatcatttgccgttcataactgcattgacttgagcacaagtggggattaaagaacagcaggctacctaatcagccgctgtctggagagctgaagttgggttatcacaagctgagagggcagtgagagcgacagtaagacaggcgtacatctgaacaggttgtcaggagacaaaagtgcctgtgaagtggccatcagaattgaacaatgaagtgtgttggtcccactgagggtgagtcagtcacaccgccaggatagcagatgatgaagtatggtgaagtaggagaagaaatatacaggagaagaaatatacaggatgctcctggattatgcttgttgtctttgtttaattattaagcaactacctctgtgtcttcttttaaaaagatgcccgtttggtgaaaaataagagtgactgattataaacaaccattaaatcaaaatattaccaaattctgcacacagaccaaagttacaataatcctgttaaagagtttctaaaacattgctgtgatgcatttctgggttgtgtttgtgtaggtgtctgtgtgcccagaatccctttgagggaatcttcgcagtccatgtagttcaggcgaggctgcttcagtcacccactgatgccattcggtaggcatctaacctaactgcaactctctactcccaccaaatcacaccagtctgggacagaggccttcctaggatactgacagaacttttgaggaaaatatctttttatgagtgtgaaattctgattgtcatctgtgttataaaatgggaaaaagggaaggagtaattaaggtaacagaggaaaagagaacagagaaacaaagaattccttgtttcaaccatgcctggagtttattctcagttatgggagacaatgagttacctttttgctcagtgtagtgtgaattgggcctgcacatattaccaagatagtcctgacaaatacaactgctttttcactaaactgtccaactttttatctgccccatctcattataccaaatataagcccatgtgcagcagctgtacaaacaggacaaaaaagaaatagataataggatgggtctaggctttggtcagcaaagaactaagccactgtccatgactggtgctccagcaagcacagctcttatatcagtcgctaatgtgcttatttctctcacgattgagatgcaagcaaattttaatagcaataagcaaagagatagaattaaaatgcaacattaattttactggcttctcacaaactgaaatattctgaagagaaaattgaaattagcatatactgagcttagaccctaaagtgttagaagccaaaaggttttagccttggcatggccaaaagcactgcttactttttgataatggcataattgctttttttcatatcagtgaaagcagaaacagaaacagcatattgactttataagtcataatcaggctggcagcctgtattagtctgttcccacactgctaataaagacatacccaagactgggccatttctaaagagaaagaggtttaatggactcacagatgactggggaggcctcacaatcatggtagaaggttaaggaggagcaaaggcacatcttacatggtggcaggcaagagaggatgctcaagggaacagcccttttataaaaaacaacaacaaaaaatcagttcttgtgagacttactaacatgagaacagtatagaaaaacccacccccatgattcaattacctcccactgggcccctcgcatggcatgtggagatcaggaaagctacaattctggatgagatttgcgtggggacacagctaaatatcttagcccttgccttccttaacatttctctgctggaatcacagatacactccatataacacctcagtttagccctggctatgaccaggtaggtgctccttggcattgttatagggctagtcttgcatattgggcccagcctcaatcatatgatgggagttctggcactctctgtccacttcattttccttaaccctactgcttcccccatccagaacctgaaacttctggttatatctaagacaccacctagtaggactgcattctgttctccatgctgtttactatacaattttctatgaaaagactggttgtttggaatcacagtaactccctccacctggccaagagaagcacagccactgtcatagtgtatgtctgctttggagttcattgtatattgagtcaaatctaaaattttatattctagtagacactgaatatggtttcacctaggtgatttcatgtgtttaatactgcatcaaaacatccttggcaagttcctgccttctttattcccacctttctgtcactaagttctctatattttaaaaataaaccttaaaggttatgaattgctgttggatatacaaatatataggagcaatactagttaggaggcttttgttagaatccatttgagagactatgttagtttagtccagtatgttagaagaggtaagagttggtcattttctaggtatttttgaaggtagatctgatgggattttctaaaatgttggatatgggttgtgccagaaagaatgccatcaaaggtgacacctctattttttatttgagtaactggaaaggtgagttgctgttatcctacttagagatgattgagggaggagcagctttggagggtacagagatggagaactagtttgggaatactgtttgtagtatctattaatcatcaaaatagagacgtagcattatttaggcaccctgaaggccaccctcactttaacaccagctgaaaagttcaagggcctccaaggccaccttcacttctgacaccagttgcaatttcaggggtcccaaagattactctcaaggttgataatttgctagaatgagtcacagagtggactgaaagctgttatactcatggatacaatttatagcagcaaaacaatgtaggttaaaattggccaacggaaggagtgcatagggaagagtccaggagaggtccgtgcccagacttttcagttgttctttcccagtggatttgtggacagtgctcacttcttcaggcaatgacctgtaacaatgtgcatgtagtattgccaactaggcaagctcactagagcttgaatgtcttaagtgtttattagggtttaatcatgtagacatgactggccacccacttggctgacctgtagtctccaacccctccagaacttgagctgatgccacatagctcaaagcctctaccatgaatcacattgtttgactaatcacattgttagcccaaggtgcccaaataaacaaaagcactcttgttagataggacatgccaaaggcttagagagtgtctcccaggagctaatggcaaaggccggatctctctttaggtaaaattaattctttattacacagatgccaaatagaaaagtgaatttaaaagtctagagtttgagaaagtggactggtaagagatatgccagcgtacagacagtgtattagagtcctagcagaaagtaaaattcacttagatggttttaatgaaaacattttgataaagataccccttacaggactgcaggcaagattttgagatcaagtagggcctgttgagacacatatataccatcctgggatccaaaggaaaagcagttaacagaaccaatgaaaagggttaacatgtgccaagcacagtgctaagtgatttgttcatttgatttttcctatatggtaataattattattatcaaatgcttataagggagaaaactaaagtttaaaacatttaaatacctttgtctatatttgttcaggagagagttaatgacctgggattcagcctgaatctgcctgccacgggctgccatgccacttatatgattctaaaatttgacattgttatgccacatataagatcatcctgtgggtttcagccgctctccatgacttacctacaaaagggtgtctagttagtgactctcccacttaggctttcctgagaggcttctgctttgctagatcagggttgtgagcatttctggtatggaagtttacaaatgggagtggagtagaaaaaacaaaaacataatggccgaattctcctgtggaaggaagttagggaagaggtaaactagacttccaggaaaacagaagcaaaggaagtatgtatgtgtatgattctaagtgtgtacacacatacacatgtacatgtattaagtgtcaaagtgtgttttcaggatttgggtgtgtttgagaagagaaaaaaatacaggattttagttgcaactgactataaatttgtacacttttaaaatgttttcatgggattgtaaaggtctgaattcctgctggaattctatttatttgaatgtatcatggttcaaggttatcaagtgtgtcctggcttcgaagagaacatagtgcctagaatgtatcatctatactgtattattattatgatttttgttacaaagcgtggaagggctttgccattaataaaacaatataatggatatgatttaatatcattaaaaataatcaagagattttaatatggggataaccattatataatcccaccatgcctatcccaccacctgggtcagatcccgtattgaaacatgcccctagacacagaactggactcagaaagattcttggcacagtgcttcatttagctacaaataatcaattatccctgacatgcaagttaaaactcatttgccacttggtttataatgtatcaagctaaaatgttttaacatgttctgggtcttcaatttactaggttatatcataattttaaaataaagaaaatttcaaagaaagaaggcaatatctctgtaaaattagcattcagacttgagtatgtcccaaggagactagccctccaattctattttgtatagctttcttttcctcctctgagaaggtgaaaaactctttgaagatttcctttcatttccttttctcttctctcttatttctctaagccccaattatctctgttttcaatgttctctgtacagaaaaaatccgcatcaccacccacctccagaaggagagaatggctgataaaaaattggagattggattttgtttcagtgccaatctactacttgtgtcaaaccattttaaattttctcattatagttagctctcttctctatttttacagcattgccacacattacaaaatccatagctggtacatatgcactatttagttagctttaaaacatttctgtagcccacatacattctaataaaattaattctttgaaaggccatactttggcttctgaataaattattatcttttctcaactgaaaaaaaaagatgatgatgaaacatggaatatagatgaatcatttttgtgtagcttataatacaatgcattttgggttgagtctgagcttgcataaagactgactgaaatgataaataggcctgatgattaagccaggtggcaaatcactagtttgtgtagctgccaaaatggatacctgggtatgggaggaaacctgggactcccttcctggggatagggtagtcgaggcctgccgtagaagtggtgtgattaatctctttagaagagagtgccagctgcagtgtgcataaatgtctcctcctggattctccttaaaagctaaattgatgacagtctcttaaaagagcagctcagccctctgtccctgtaagataaagacaaaccttgatttcagctactactgaaataagtaaaagtagaaaaaggttaaaaaaaaataacagtactgtactcttagtgaaggaattagaggtaatagaatgttactcatctaccaaaatataaggataattgcaatgtggtacccttttttgttagaaggttttgtggagcccatctgtgcagattgtttgttttttactatcattacatcaattaattacattagggaagaaggggacactttaattaaaaggctgttttaaggagttataattctactctgtcattaaataatttaacaatttaaataggcaccaaatttgttagtaaagaataattctgaaaatgtttgtttgtaaattatttatattaaccacattttcagcaaaattaattttgcctttttatttcatcaaatcaaagcgtccattgatttcttcattttgaccaatggactgtaggataggaagacatataaaccatctcaattattttgagagacttattttttcctaaaagagaaaaacctctcattttaccaagtatgcatatttgcttgtgtgtgatatgtctgattagggtaatcttttctgcaattggcatttttagaacatgatgagttgcaaagagaagacatggctggtgaaaagatggatatagacccacagaaataaatatatagccaataatgtaatttaaaaacattgctgctacttaagtccatacttctttggataaaaaccttcatccacataagttatactacaggaatgcctttgtgtatttcacataaaatgggtggataaacatctattttttggatgtcttgaatgcatctttctttttgtcaaccatcttccatttttctagagtgtgctaaataatggaattcagagacttgtatctaaatgtcagggaataaggaaagcaaaggattaagaatgaaaataaatatggaaatatgagaaataatatcatgggacagaacaagagaggcttagaagctaagagaagattctaagcaactcctggtgcaggagttgatggaaagtgagaatttaaaaataatgattctgcattctgtatttaaactgttctctagactgtttctgtctgattgaaatagtaagccattttttttaaaacattgaatgtgaaaagcattatagaaactgcttttgtacttaaaaaaaatgccagagtcaaactgtatctcatgcagttgaagactgaataagtaatattattccagtcattatatttatctaggatcagtgtcttacacatagtggatgtgcaaaaaatatatgtggaatgaatgaatgaagataacattttactcaaatttttaagtaggagacggcaggtcctactagtagtgaggtttttatctttttttcactcttcaatgttattccccagggaaactggcaaactgaaatctgttacattaatgccagcagagatgtatgagtgtgaagagaataagtaaacatttattgtacctgatggctcaatggactatcaacatgagctcttaagagacttgaaaatacttggcagtgtttatccttaggatgaactctacaaaaactatttgtggacattattttcagaaaatttctattttggggtcagctgagctttttcaattcaaaacttatgagctaatatgtaactatataacgcctttcctttggcaatgagttaatttcttaatgttttttaattctaatgttaggttttctatctaaatcagtgtcaaaatatcatccaaaaatagagatagtagctagtacatttttaatacaatattttcccatgttacccaatataaacataatgacaaacagccatttactgagagtctaatatatgccagtttatttttcagagttttacatgttaaaccatagatgattttaccttcttatagagaaaaatatatcaaagctgagagtaacatagtgccttgcacaaagccacacggattgtaaaattttgaactgagattcaaacccaacaccccagctataatagactaaatcccccaaatttacatttgacgctcacaaaatcttgtgaggtaagtagggcaaaagcaatttttattttctttattcacctagggttgttatttgattattctgcatttatggaaataattttgtgagaatgatagaaatttaaaatgggaacaatttaggggtaatctaaattagcaattcttagacattttcgttttagtaccactttacatccttaataattattgaataactctaaaagtatttgaaatatgtgctatattccttgataccatattagcaataaaaattggaacattaaattcattattagttatttaataacaatagtaaactacctcttcacataaatattatatttttatgataagtacctagatgttccaaaacaaaaaaaaaagtgagaagggtagcattattttatatacttataagtctctttactatttagtttaatgggaggcagctagattttcacatctgcttcctcattcaatctgttgtaacatcacatgtcctgtaacgtctggaacactccactgcacatgtgtgagagaatggaagttaaaaaaacaaagaagggctgggcacggtggctcacgactgtaatcccagcactttgggaggccaaggcgggtggatcgtgaggtcaggagttcgagaccagtctggccaacagggtgaaaccccatctctactaaaaatacaaaaattatccgggtgtgatggtgggcacctgtaatcccagctactcgggaggctgaggcaggagaattgtttgaacccaggaggcggaggttgtagtgagccaagatcgcgcaattgcactccagcctgggtgagagtctgagactatatcaaaaacaacaacaaaaactacttagtattatttaaaaatagctagacttcagggacccttctgaagggtacaggtgtctgtggagccacttcgagagctgctgatctagataaaactttcatttagaagacatggaaattaaggtgtctcatggatctgctactgatgatcgattagagaggggctgatactttcctacaagggtattagatatggctaggatggatgctcaaactatcttatggaaatatatgaaggtgattttgagtggcggtttgtattttacctccctcccactgatgacacaacaaccaacccgcacaacccttctgaaactacccttgcctggaacagcaatgatcttgttaaattcaataaccattttttaaaaagtgcttactgagatttgtttgttagcaacccttgacatggctgatcactcccttcattttgactcaattgtatggtcctcccatgatctcacactcagtgaaagcaccctctctctccagatgcccaaccagaagtcagaaacttcccagactctgatctcttcctcaccaagtgatctcaatcatcttttcttataaatatctcagtattccatccacattttttctgcctgatattttgccctgactatgcatcttacctctcttacattatcactactatcttctaacgatttgattttattccttatttttatgtgtttttttttccaaattttattttagtttccaggtgtacatgtgcaggtttgttacatgggtaaattttgtgttgtgggggtttggtgtacacataattttgtcacccaagtaatcagcataataccaataggcagtttttcagtcattagttcacttcaaataatgaactccagctctgtctgtgttgttgcaaaggccatggtctcatttttatggctgtgtagcattccatggtgtatatgtaccacattttctggtatctaggttgatttcacatctttactatcatgaatagtgctgcgatgaacatacacatgcatgttttttaatggtagagttatattcctttgggtatatcccattaatgggattgctgagttgaatggtgttttaaattctttaagaaatctccagactgctttccagagtggctgaactaatttacattcccaccttttctccacaacttcaccagcatgttactttttgactttttaataatagtcattctgaatggaaaatatttgcacactatatctctgacaaaggtctcatttccagaatctacaaggaactcaagtccgcaagcaaaaaataatcaacctcatttaaaaatgggcaaaagacatgaaaagacacttccaaaagaagacatatatgtggccaacaaacatatgaaccaatgctcaatatcactaatcattagggaaatgcaaattaaaaccacaatgagataccatctcacactagccagcatgggttttattaaaaatccaactatttctttccccggttcttctcatcggtcctccataatctgagcaattcttttgaactacagattccaagtgggcacttttcacagctcttaggttaaagccccaattctttcaagtattttacaaaagcttctgaagcagccccgtgcttgcatctacagctgggcttgtcactgattcttctttgcttcataagattctctgacctgctccctcacttccatgacagtatataaaaactgtttattcttctatatgcattcctttgactctttctctttttattcatgtattaacttggatgtcacctcctttggaataatttcccctgagtcctcccactctgagttagattatcctgtatatgattcctcaatgatgtgttctttccaaccaaaatattatttgccagtcttcatttgtagttacttgcttaatatcattttcccctgtatacttttagtattgtatgcacagaaacttcatctgattttgtctttctatagtgaaagaataaccccattaaaaaatgggcaaaggacatgaaaagacacttctcagaattgttctacccaatgttgagaacaatgttggacttacagtaagaagattataagtcatacacatttgttagatgcattattaaatgaatattttttctcttttttctgcagttagttgtatttatggttttctgactcacctttatgaagttgagaatcttgctttgaattaattattttattgtcctgttagtataatatagttactatcctgtatgactgctatgccaaagtggttcaaagactggctctcgtatgacacctaaaaccaggtgaaaccaggcctatatttggaaattggcctcattcttttatgaccaagaaggtcatctgggaagattggttaaaatatgcatgcatgagttctaccctctgaagattctaaattggttgtttagattgtaagcagctccacagattactgccacacctttcaaagtgtaggaactactgacttactgcaagaatactctggtttatttataaaaagtagttaaagagttaccttgtaaaatgtactctaatttagtagcagagcactcccatgttcaaagaaatatatagttttctgaatgtatagttttctgtacatatatgtttggaaggacgtcatagccgaacattaaactctagcaggtattacaagttcaagtacctatttttgtttctttacagctcaatgttaacacctgtactcattaaacacatcttacttctctagaacttattgtagtatgtttaatggatgcatttaatatcaatttttatgtagtatttatttaaatagcattagtaaatatttaactttgcaaaacaaaatgtggtaatactattttaccatgcaatttttgcagctgttatgtgtagaagctgttaggtgtagaagctgtataacttacagtgaagcaactttatggggccatgtgtttttaaaacaaaatataccaagtatatttgtgaattcacattttttattgttaattgatacataataattttgcatatttatggagtataatgtaatgttttgacatatgtatatatgtactgatgacattagagtaattagcatatccattaccttgaacatttatcatttatttgtgataagaacagacaaaatcttctagctattttgaagtaaataaaaccttattgttaactatagtaatccttctaagcaacaggacaccagcatttattcttcctttctaattgtaactttgtacccactgaccatcccctctccatccctctcttccctctaccctccatttatttttatttatatttactcctgttttcaaaaaggttaagtaacaggtatgtatacatacatacagacagtacatgtacgcacacgcgcacgcacacgcagacacacacacaccacacacacacacacacacactcgagaaacagagagaaggaaaaagagacagtttctgattatttacaaatattttgctttatcattgtttgtcatactgtattgatgaaggtagtttttcagggaaaatagaaatagatactagtatagagatgagatttttaaaagataagaagaaagagtagaaggagaaaagaaaattgcttcatttgatccaagctgcaatggaattggatgatctttttttcttttcacactcttttatatagtggatcttttgtgtcagctctttaatgtgtttcattacttgaagactgtataaaggaatacattcaataatttttctcttattttaaaatgcatcacagttatatgacttattggaaatatattcattaatgtgatatatttttaatttaattatcaggtacttctctaggagaatgcttactttacaaatgtgtgcaggtatatttactttttaatttaatgttgttaactagaaaacaatacaaaaattgttagcattattttttaaaataattatggttcaggctatttaaaatctattttattaaggaaagttatttcactgttacatatacaccaacttgagtttccaggttattcaccagaacattacatgttactgacgatgaaaaccaagtaaccaaagtttctaataatagggaatagttacataaattaggtgcgtgataaaacacagtgttcattaaaggcaatctagaataataatcactgacttacaaggccctctaaggcattatcacaaaacaattattaatgtaaaatacaatacaaacaaagctatgtgtgtacacgtgtaaacgcacagaacgtgttatggaaaaacagtatttcaagcctttaatagtgacagcctgcaggggagtagaactggggtataaagggaaactattttactctatgtctttttatacatttaagttatttatattaacttttagtcatgtgtttcttttataacttgaaaaatgtcttaaagaatttgagaaatgtttattttaacaaaaataacagaggatatggaattgttttgaaacaggaatttcaagttgcaccattaaatacacttatacatggtcaagaaaattatgcgttcttggccgtatcaaactatctcatgtagtttataatatacaaacctatgtaaccacaaaaattaaaatgaaataagaagaaaattatacattctaatgagtgttttctgattctttgccctactctattttttatctctaatattcttttttttttttccattttaattaaaggtctcattcgtttgcaagagctcatcaaagctccatcaaggtataatcttcgactcaaaattcgtcagttacctgctgatacaaaggatgcaaaacccttactaaaagaaatgaaaagaggcaaggagtttcatgtaatctttgattgtagccatgaaatggcagcaggcattttaaaacaggtaacctttaaattacttcaattcttgttttcttcataaacttgcacttacaatatgatcttcttttaaatcaaaatattattgttatgcaatcagttataataaccttgatgtaattttatgatagaaagtctgacaattgcttttaattaattgtcttaaaagaaaagtaatgtaaacattgatgatcttcaaaacgggttgttggaagtttggaggttattttcaaatgactgcaatgctgttggttaatgagatagttgattaatgagatagttatttctttttgttttgaaatgagggaaggaactaagagtcaaccagttgagcagctcactcattacaatcagccagtaggaaaaagatgtaatagatttaccatttacctgatatttactgtaagagactttatatatttgatcttatttcatcatcactacaacaaaaagaagtagggactatctctactttacagacaaactgagtcccaaaatgaacaagtaacttgaccaatgtcaagtagcaagaacatagcagagggattgatatccaacctaatgatgttaacaagtattcattccagaataaagcattgcctgacaaaaaccaaccaaccaaccaaacaaacaaacaaaaccttctaaatcaatcaaacaaaacaatttgtagctgtgaaatcttttagtattatgtcagcattattcagacctaacagcaaactggaaaacagaaattattatcagtccatatcttacagatgaaggaactgaagttgggagttaaatggccagaacaaggccctacacttactatgtagtagagcctggatttgaacacaaatttttggattttgtttcttaaactcttttatgcacactgagctgacacctttgtagcttggaactagtcagtcatttagaaacctctcatgtataggacaaaatatttctactggagagttacgcagattcagatgtcaaattatatcccgttaaatataactgccaatagtaaatgcctgttatagcatggttaatttattaagcagatgtttatccaatattccaatataaatgttgattttcacagtaaaatatttactttgatttgaaaaattgctatagttttatctttggataatgaagcatatgagagtttttgggtttttttggcaacaaataaaacaacgcactaagattactactgaactctagagtcaagatttatttcacataattcccaaacaattcctgatcatggtttgaatacacaggcttggaaaagagacctttcctttactcctggagtgagtggcactaagctatttcagtgacagagctttggctgctttctttaggcttctagtaagtatgtaaatgatcagctgtcttttctctaaagaactaactctcactattttgctatctggaaggtgagaagcctgtcacctttaaatttgaacttgctttctgacttctattagatatatttattattttatacttgttttcttatgtgttctttgcaaacatgctttgtttgcaaaaggaaaacagaaataatagaatattttaaatacatataacagaaaaatgtaattttaacaaggtcagtagatgaaaaattagaaaataggtaaaatgagaatatgaaagttgagatgaatccagagcgacattattatacagtatgcatcctctgaggtcctataccagaagaccacaaatatggtggtgttatttttaactttgtctcacatttgaattttccagttattctagtaaccaagaagaaagtgaatagcttctaggaaattcagcagtgcatttaatagggtcctattttgtgatttgtgaaatttttctgagattcctgaacattcactgatgttggaactcctaagacatggtataggagttgaagagcaaaaatagatgagctttcagctagtctggcttcatccaagaatgaataataggactatgcagaaaaataaatggccttaatcagtttactcttgtgcgtttgtttgtgtaatttatttaatttatttatttaaactgattgagcttttactagttattgaacaacagtgaatttgaagttttcctgctagaaagctttaaaagtgagtggagcttgcggttgagtagatttcctctgaggcaagttgagtacactaattggcatgcatgcctccatagcagatgattctacctccatccagatttatcaaagaaaataccctagggcagagccaagatcctctgaagtaaaacctcacaaggacattctatcacagggaaaaaatagtaatcaggaacttcaaagtttagatcagagagtgtgaaataaaaacttttagcctggaaaaaatgtaaaagaaaatgctaataaaatcctacagtggtgtgaagtaaaataaagtaaaaattgaagaaatgtgtataggcccccctcatattgttgaccttgagcaatatgatttctggatcttacctgaaaaataaactggttgcatattatctgcctagataactgcatgtgttaattcatcatatagcatagcactacaccagcttaatgttggggtttctaataatattttgactttagaaaatttaatctgtagtatttcttttaggagagatgatatgacaaccgcttttatgttgaggcaattattatattatttgtgcataaaaacatactgattttattctctctaatatgtttgaagtgtgcatacaattcactcaaaagtagcagtaagacatgctataattaaaaccagatccagagcaagttatttaaaaaaaaattctactggaaattattaactaatcttttaagagagtattcctgttgttcattctttttgagtaaggttacaatgtaggtacttaatcaaaaataactactatttctacctccaattttgtttgtttgtttgtttgatggagtctggctctgtcgcccaggctaaagtgcaatggtgcgatctcggctcactgcaacctctaccttctgggttcaagcaattctctgcctcggcctcctgagtagccggtattacaggcagctgccaccacgcccagcgtattttttgtatttttagtagagacaggctttcaccatcttggccaggctggtcttgaaatcctgacctcatgatccacctgccttggcctcccaaagtgctgggattacaggcatgagccaccgcgcctggcctcccagcgttttctacgtcatatatcacagcacattaactgatccttgttttcaaaatcaaaagctgagagaaggtcaatgaaagccagaaacagactccaattaccctcatagatttcttctcaaggtgatgaagaaaaacctgtagccattggaaatacatatgtcagaacaaatcatcttcttctccaccatctcctcaacaacttcccctacaccaaagcagaatttgatgcacttgcctgagacgtccatgttttcaaattttcaaggaaggaacaggcaaaaattttagaatgcatggagtcaaaaattgttctacaactttgagaatatgaaatataccactttagaaaatgacatagattccaaactccacattagagacctggagtccatgtttactcactgtctcactttgttggacagtttattcattcttttcatgtcctagtttccttacccataaaatgaacataatagtaggactgacttctagggtttttatgaggcttaaatatgtaatgtgcttagaatagtatctgacaaattttaagcattatataagtattatttttagttatacatctgaatcgttatttctttcaattacctttatctctagttctatacctacagagttgataaagtaaaaaaaattgccaagcataatattgagctgtcattgaatggtactggagatagggagccatctgaacatatccatcaggagcaatgaatgccttctacaaatatgatcttgtaaatttgtatttaataagggaaattctgtcttattttgcttgagatgaaattttaatccgaatattattggtttatataagtattacccactgaagaaatattatttggtaatttgatacctaaatttcctgtgctcaattctttgatgccacctttcattaaccaatgtttctccctttttaaatatatttgatacattccaaatttttcacaaatatctattccttcttaaagaattcatgttgcagaactacaaattctatcccacctaactggttaatgctgatttatgagcatgatgcttttcttatttttattttttatttttaattgttgtgggtacatagtaggtgtacatatttatgaggtatatgggatattttgatacaggcatacaacgtgtaataattacatcagggtaaatgggatatccatcacctcaagtatttatccctgttttttgtttgtttgttttgtaatggggtgttgctctgtcactgcagcctcgactttgggagctcacgtgaccctctcaacctcagcttctcgagtagttgggactaaaggcatgtgccaccatgcctggctatttttcttttctatttttttttttttttttgtagagatggggtcttgttatgttaccaaggctggtcttgggctcaaccagtcctcctgccttggtttcccgaagtccagggattacaggtgtgagacactgcacccagccagcatttatcctttatgttacaaacaatccatttatactcttttggttattttaaaatatacaattaaattattattgactatagtcaacctattgtgctatcaaatactagatcttattccttctattttttaacccattaatttctatatgcagaatgtagttgaggcagctacttcataaatgagtttttgtagttagtggcttttggaaggctattagatgtacctgagaataattgtttcctactaagaactcttcattcaactaaaaatgcattgttttttaattatccttgccaactgctgttcattgataagcagttatttcaaaagcattctcttatttttggagagaaaatgacatggacacttgttataactaaaagttctaacccaaaagtccttgtttttaagattgacagtctaaaattgatgaggactgtagaagagtgaaataaaacacagtaatttgtgactagtttattaataacaacaaaaacatttctttaattatatgtaatttttaaataagagtggtaatttacatttccttcattaatgctatggaaatgtctctaaagagctaaaataaatgcctgttggcattgtgttttgcagcacttttttcctaattcagtaatattgttcattaaaataaaatggtgttcctcattggagtatttgtagtgaagacgttacgaatgtaacaaattaagatgtgctaatttcaggttttgtgtcaaatttaatgccttctttaatgtgttaagccatagctttacaattgcaaacattcaactaatagcttttctatctagagaattgcttcagaaattccttcagtaaccactaatctttaactactgggaaaagatttagtttaacctaattgtatgtaacatgaatattgtaggttgattctttatcacatcctactatattttgttctcacttgaattactgacatactgtctttcctgaaatatgtaccttcagtaatttttttttttccttaggcattagctatgggaatgatgacagaatactatcattatatctttaccactctggtaagtacttcattaaaacaaaatgttctgaattttattattatgactttttcagatgaaaaataggttttttagtaagaagtattatgactgattcctttgtagttatattttaatttgataagactccaccaaaattattatcagagaggacaactcttaatagaagctgatgattttgaaataatatcatttcagatatcaattcaaaatattgcatatcttatttttatgttgctttagagaactttcagaatataatggatcttgaaattagtttcctgagaaatcagtgctttagaaaagcgcaaattcagccgggcacagtggctcatttctgtaatcccagcactttggtaggccggggcagaaggatcacctgaggtcaggaattcaagaacagcatgaccaatatggtgaaacccatctctactaaaaatacaaaaattagccgggcatggtggtgggtgcctgtagtcacagctactcgggagcctgagacaggagaattgcttggacctgggaggcggaggttgcagtgagccaacagtgccactgcactccagcctgggcgacagagctagactccatctagaaaaaaaaaaaaagaaaagaataagacaagaaaagcacaaattcttatgttatctcagctgtattcactttttgaaaatcagatgtattgaagctgtcctttcagtagattacattttctattctgcttttgcctgtatttagttagattttttaaaaagtcaatatactttaatttgccatcagcaaattgaatgttacctttatattttgttttcacatacccatcacacaattttcccttataatgtatgaaaatctgactttaacctgtatcaaacttactgttagctccattttgttatcaatacattatcctgacctttctttctctgtaaaacagctgtctctttactaattctttcttccacatgtcccaaatatgagtatctccaagtttggacttcatccaatcttattttctcttcaattattttcttcagaactggtttgtatttagagcctcagttaacatcttcgttcgaatgaggtctaaatgttctatgtaatatttatgaattactgtatactgtaaaacacttttaattgttgtgccattagataatttcgaaatatttaaactttagtgtcctctgaattgacgtctcttctgattatcttaaaaatttcaacttttgttgactcctgtatcaccaacaaaattttactgatttttcctttgtagtgtctctagcatctatcttctccattcccataacaaccagtctaaccaaagttttcttcattaacttgaaattcttccagttagtctccttgcttctagaagtcttgaagctgccagatcagattattaaaatttaattgattgcaatagcttcctgtgatgacaactcttacctccaaaggagattattcatgcagtaggatgtattttacttaaaaatagcaaagctggctctggcatatctctatattatttcctagcagacaactttttgcagcttgtaagaaacttagtggtgggggtggagaggaagtgagagcattccctcatcagcaaattatatttcagtgctgttacaactcagcataagcgtaagattttggggaaatcaaaagtatctgtcaatagggaaaataaatgaaacaactagtttaggatacatagaactcataggcctacatttgaaggccttttatactttgatcctaatcaaactttcccatttccttttgctactattctcctttaggaattctcatttatagctgaactgatgtggatcagtctcctgaataggttttatatcttctaatttttgtgtctccactcacactttgaattctctttttgtcaatcatcagcccggtctttctttaatggcagctgtaggggagaaaagatttcttttcctcacacttcatgaggttcaaggctgagatctctataacaaaagagaggttgacaagagaaacacctaaaaatgtatttaatataaattttatgtgacacaaaagccatcagaaatgaagactcaaagaaatgggaaaatctggattttttttttttttttgctttggtttgataaagagtagatagttatgtaggaaaattattggacaaagggaggttatgatctaatggcaataaatccagaaaacttagcaaggccaaattgttcagattcttcttgacctccaggtatagggctggatccctctggaatgagagtcttatgacctcctttctgtgggggtaggtcagagaattcttttatggtccacttcaggggagaaaggtgggataaggtcacagagtgaccttcctgcttctgtgtcttctcaatttcctatagccaagtaccatatttgggggtagcatgttctgagcctcatcacagctaagatcccatctgctctgtgaagtttttcttgaccatacaaattgaaaataacttgtcttgcttctgacttcttttgcatttatgatttctactcttttaccacttggcatatattgccatcctttatttattcacctctttcctatctccttggctagattgtaaacattaaaaaataaaaacctaaagattcctatgtttttcatagcacagactagagctcaggccaatgccagctgctttccactgaattgtattcttattatctagcctgtgtagctgtatgagtctgaggcaagctgttcacagaaccaatggcattaatcttgccttgattctcaatattgtccataagttcgagggttagctatgccaactagaaagagggcaaaactccacatgctggatgttttcatggtggcatccatttccatgatagctttggcctcatatctcctgggacaactaaagggcagagcaagaaagttcactatatacagactagaaagggcaacaggcataaagtgtttattggaaacttatagtgaagttcctaggtgtgagacctgagatgaaggaactgtattgtttctgcaaccaaaaaggctagtcttggccttagcatttttttcacacctttcatacagttttcattagttagaagctgtattttgtgacttgctttctaaaaacaacaatcaaacaaagaaacactgacaaaaaaaaaaattaaaaacagcaataaccaggcgaggaagcaggacacagaaaaaattaaagcaaaatattaacacataaaataagggcaagctatcctaaacagagagaagaaagctattgcaaatcttagatgtgagttgtagaagagcccattgtttcactggcggatttagaataaaatatatacatagatttttacatacggagcatgtatctctgcaatgccaaagcatgaggacagtctatttgaatcttggtgatttgtgatgtttaacgtcacttgacacaaaggtgttaagtgacctaaaaaaaacaaaaaaagtgactatttcaataatacatgcctgtgaagatactctgtcgataataacaacacaataacatttgtctttcaggacctctttgctcttgatgttgagccctaccgatacagtggtgttaacatgacagggttcagaatattaaatacagaaaatacccaagtctcctccatcattgaaaagtggtcgatggaacgattgcaggcacctccgaaacccgattcaggtttgctggatggatttatgacggtatgaatacccacttaaagatcagtttgtgtgtttctaaatagtattgcatacatatgaacttctgggtttatatgcatacatataaacttcagtttaattgtttgacattaaaagcaaaatatcagagctacaatgcaaatacttgtattaacaatttttttaaatcaattttatatgaaaagcttatgcttccatccaagtatctcaaaaggcattacaactatcaccagggtactacaacataggaatttctgtaaagttaattagtgccctacatgggagaaatgagagactgaaagaagacatacatctggtagttatccttctgatcttacctatcaatatacgaatactcttcaacatgatgatttctggtatctggtgttatataaatgacttatgtcacacaaaacacacaaaattctcgcatgagcttactcactctttaaggctgaagactaatcaataatcacatttgtcattttcaagtcccagtttaaacccagaagcggcactattgcataaactatgaaagaagggtatattcttatataacttagttgtttatgccaaacaactttagttgtttataccaatgcttacaataaaaatctaatggcaaggcatacataattttaagttttcttatactgtgtcctccaaaagataggtaaaaatcagtgtttgtttaagctactatgtaaaaatattatttttaaataagtaatcaatataaaaattatgacttcagacattttatattttttatactaaatccttgaaagatggtatgtatttgacatcatgcatattaattcagagtagtcacatttcagtcatatttactctgtagtagccaaatgtggctagtgtctaccttgtcagacctggtaggtatgtgtcatgttatttttgaaaattataaatgcctgatgttttcttattaaatcatttttctacagactaaagtatcactataattaaggaaatagcttagcagtggggtgatatttacatttcataggaaattaccacctgcttttaatgagtattagtctaaatggagaatttataaacaaaaacatcctctatccttacatgtatgtagaaaagctttttctattatgcttgtaatttttccattaattacttcaatagcttcaaagcttgtttttgatactgtagggataaaaggaaaatttgatttttttatccttagaaggttttgtaatacaaattgagtgccttcatagagactatgaagaagaaatggttagcctaaaggcatcaactttctgatggaacaaaaaatacatttgttttcagtttgtgagaaaaatcacctactagaatttcaaaatatatccgtatgaatttgttttaaaagaaacactatagggaaattgtacttcgttgcataaagagatagttgaacagttctagtagtttagttttaacttacgtttgagaatttttattgagaggaaaatacctaaataacttaaaaattaaaatattttccttcaaagtggagccagatttaaaataaaatgcaaactagaaaaaattataaatgttatattttattaccagtttaaagatggtgaatcaaacttttgaaacttaagacaatgtgattttttaatattataatgtatgctatcctttaaattgttgttatgatcatgtgaatatttttatataatatataaaaatatttattatataaaaatatatattatataaaaatatttaaatatataaaaatatttatatattataatagctttctttacaattctttgatttcaggatgaatgtcttattatttattttcaatagcactattaaatggttttaagaaaagtaaatcagtagatatcagcacaattttacacttttatatatttacttccacagataaataagtccaatgactaatgtgccccttcatgtatcagaatcataaaaattattcaattttactttggtacactctgtatagctatgtgagtccctctgtgactttacacatcatctcccgaaatgaagtaatccctaatttgtggcaacttatgtaaactattgaaagacagataagtacaaagaatgatgtattaatttccaaggtagaagctcttggagagaattaacctctacaatatggaaaaagagagaggatattaggagaattacaaatttgcattctctctttctagcacgagtctattcctcttctgcttttccctgttgaactggcagatgatttcttggaaggggaaaaatgttaaaatgaaaatggactgatgaaaaaatgtgtctattaaaaatcctgggcattatatataaaccatggattctgagttatttagaagaattttccatgcaattctctttcctttggtatagttcttaaatataaagtagatatgaagtttgtcattaaaataaaggtttcttgcaaaatagatgcagattgattttgtttttacaatttcccttttggaaaattaatatattttaaaatcctttcatcatataacattgtaccaaaattttaaaaaaatacataaaatattttcattatgtaacattaattcttaattataaaatagcatatggttattaaaataaaaccaattgagttctgtattaaaatgtgggcatatttatgtcttacataagtattctttttcttttcaatttaaaattgtaagcattttcacaagtcattaaatgtttaggaaaagaaattaataagctgtttccaccatgaatatagtcagcaaattaagaggattctagttagaaaaaagagaaaaaagaattatagcctggcattgtggcattggcaacattcccttcagtcaattcatgagatctcagtgtttatgtatctctttttctttttatcccctatagtcccataaagaaatgggattatcagcaaagtttctagtgcttggagcaagacctattattatcagtatcataatcatttgccattgtgtaagatcatagtgctcagactttgacatcctttcttcatgtttgagctataaaaggaaacagtaaattggattcataagagtttttctagttgagttaggattttaattggcctttgagatgactgtttatcagttaaatgactactgaatacaaaaccacttcgcttgccattgtagtttctttctctgcagtctagggtcatcatattaaagatgttaatgttagtaactcagtaaaatttttagtttcacttggtataaacccaaccaaggaaccaactcacacagtacttccaagcctgatctagttaaggaggaagaaataaagctcaacactcttcttttacacatgagggttttcttttaacatatgatatcccacttttctccattcccacacaatgccatccagttagtgctctgaacttcccagacataaaccccttattgtaaaactctttccatactctgcattctgtattgtgttcccatcttttcatgctcctagaggtgtgcaaatacctttcaatgagcgttactactgttctttattgcaaaatcagataacatcttccccagtcctctgaccagacattgtctgcctttatgtagcacatttactataggatgagaattcacttttgaaccagtgccaatcagagcccgacaatggtgatacttgttattgatttattgagtttacagcaatttcaggtaaagacaaacacctcagagtacattttaaacagtctagctatatcccagaaatccttcccagtggttctaatatacatatgcatattaataccaatgtacctgtaatccattcagtagcttaatttaattatcagtattttttttcttgtgctgatagataataccacatatttccttgataatataaatgtattacacaaatcaataataatcatattgatagactatatcatttgggtttctatagggatattactgttttagaagtttaaaccctggacaccaaccgctatctccatttcctttcacctcaaaaatcattaagcactgtcaattttactgtatcaatatttttcttaactacattcatcttttcaacccagaactttatcttagttatgatcgttccctggctttcctaataatcccctcactgaagtcctactcctaacatctctctcctacattcaccttctttctagtatgatttttttcagaactttgctcatggctcctcatcatttactaggtgtaacttgagctcatttgccaagcctaaaaagccttctatggtctggctctttccaatttgtccagcctcatatttgcttgctccctgttccaccaagccaccctctcatctcacctttgatgtgttgtcactcatcatgtatcacctattccagcataggatacttcattatttaaaccacttacctttttttgaatgtttggcatattcctactcatactctaattttcaggttttctgttaccttttagattgaatgtgctgagtcctccagatattttatatgtgtggtcctttatttatgcactttatgtataactccatgttgaaagttaactctagtgctttagtttgtttttacatcactttttcaatagactgttagctcttttgaagcaagaagtagatattgtaatctttgaagtccctatacctagtttaatgcctggtgtaaaacaggagctcataatgagagagtgactgcctgattgaataaatgcatttgttaatttattttaatcatattacatctgtgttctaatcattagttcctctaatttccccaaatatatgttggagagcattttatttgccctcttgtactttattatcaatatatctaatcatttagaagatgtaattaggctagtctcaatgacagaagcttagaaatacttttttttcttttttttttttttgagacagagtctcgctctgccacccaggctggagtgcaatgacagtctctgctcactgcaacctctgcctccccagattgcagagattcttgcgcctcagcctccgagtagctgggattacaggcgcacaccaccacgcctggctaatttttgtatttttgctaaagatgggttttcaccatgttggccaggctggtctccaactcctgacctcaagtgatccacccaccttggcctcccaaagtgctgggattatttataggtatgagccactgcgctcggccattagaaatacttttgattaaatagtgaaagtatagtaagttagaagagtagttcccattctttttacaaaggaagagataatgtttatgagaggtgagtctttatgtgttttaattctaaagccctaacagttatttctttataataacagaccacagaccccagactttataatttccttttttatttgagtatcttaaaataaaaatgagcatcttgtatatacatcttacagcaggaatttagctcatccactaaggtgacacaagtaatcatttgttactgtataaagatttacttgtatagctgggtgtggtggggcaggcctgtagtcagctatgtgggaggctgaggtgggaggatcacttgagcctgggaagttgaggctgcagtgaacagtgttcacccagctaaactccaacgtaacaccccgtctcaaaaaaaaaaaaaaaaaaaaaaaaaaaaaaaaaaaaaaggcaatggaaatagaaccatagagaaataaagtatgaacagaacagacaggctttttcatttactgctagaacaactgcaagcccacctttgctgctatttgcttgtcttaattaattttagctgtttttctttaattcatttgaaatgaatataaatataaggttttggcaagtaatggatcaaaccaactcaacattttttaaattggtgaagcattttgaaaaagttggcttcatcttatattgcactaaatcaccaaaataaaagaataaagagtagcaacataatgaattgatgaattaactttttaaaaatcaattttaatactgtgtattgtatgcagcacacaggatttgataccaggcactcaggatttggtaatcaagacaatacctctatttcatcaaataactaagggaattgataaaatcagaagatagtaactgtttttctgatcacttcacaatctttgttgatataacaattatgttcaaaatgtgatgttgattgcttcttaattttgtatttttggatcttctttcctgtcttcctgaaaattcttgttaaaatttcctgttttccgtaatcatttatgatagcaagagacacacatatatttaccaagaatttaacataacttcttagtattttgtcgaaaaatgtgtaacatttcacaaaatttattaacataaatgttataactactagccttattcttgttgttaccacagaaaaaacattttggggtccataatataataaaatatggcagaaatacttgtatatttcagagtatgtaatgaagtcataagtacaacatttgttacatttatatatgcttgatttaatgaatggtaaaaggacatggagcatggaatgtgaataacagaatggcactatatttctttattttatgtacatattaatcttctaagatgcactaagctacaagttaaatctaaatacaaataattgagatgacctaaaaacctccattgttttattaacatagaacatttcgtctaattgccttttctcatccacagattaaataagcagcatttaagcatctaaaattgatggatatggaatttctattttaagtaattgttttttacatgaaaaatggcagttgcagtgaagcattatctttatggtcatattatttttataggtcaattttcaaacttttcacttgggaaaagtaagggtaaatcaagagagattttttccccttcaccctgaagagcaaaatttatcttcaaagcattgatataatattatgtgacaccaacttataaaggataaatacatttctgcacacaattttcttcagtctcttattttatatttaaaaatgtaggggagaaaaaaaaaaaactttacctgtcttaggtttgttcattgtctgggacctctgacagaagacagactaacatgaaaaaataactgaagttcattgttgtatgcagcacctactcacactgaagaactcagatgggaatagctcaaggggtggttagaacgtggacttattagcctcttaacaaagaaagatatctttttagaaaagtgccaatacaaaggaaaagtgatttaggcttttaggggtggcaaattgtgagcagatagatatatacatataacattatataaaaataaaaaattatatatatctaatatggcacttgtaggatcatatgcatatatatgtgactatatcatatatatgtatatgatcatgtacagatatcatgtgatatgattatatcatatgtatatgtatatgatccaacaagtggcatattttggggtggcatatcctgaactccttcaacagctatatggttttacgtggatatgacgaatcaccaatgatatgaggaagtctagctagacagaaatttgtgacgttcaggaaggagggcccctcaaggacagtcaatgtcaaggacacccagaagaggtgatgcccaatgccctgacaagagcatgaagtccaactttgcagagtctgagaactgacaacattctgagatttaagactccacatctgcatctggactgtggcatcaaggtagaattaataaaagcaatgaatgtgaccttgaaaaacaaaaatgccaagctggttattgaggtaacaaggcattgaacttgagaaagcaagtacagggcacaaagtaaaggaaatacaacatggtcaagaaaatagagaatggattatttcactggggtcggcactcagattctaacctgagaatgaagttaacagcaagtttgacataatgttcaatgctgtaagttaaaggagtggattgggaaacagtgggatataaatctgggataatgttttttcacgctaattaattaaaagataattataaatattctacatttaacatagaaaatcaaaataattaaaaagcatcaaatactggttgaaattattaaagaagagagagtaagagatggaattgaggcctacaaataagaaatcttattattcaaatattcataatatcctacagcaaagttctggctaaggaagtttattactgtaactatagtgcactctcatcatagaaggaagagtggatctatttttaaaatgtatagaatatgttttctggctactagtttgcattcagggtaaaaatacaccaaactaaactatatgttgtatttgggatgaactaagatggagtagactggtggtaattatcaaagctataggttttcccatattatttcagttttatgcataatctttggaatttgtttttggctcctccccccaaaaatttaaaaccaatgccatataaaaaaataccttggcctcatcccagtctttaaaatttgcatttagttgaatacttacatttatatatgattttatataaatataaataatataaaataagagggaaatatataaaaatatataattcttatttatatctaaattcatattatcatattatcttaggtaatatcttaatacgtttgtgctgctctgacagaatacctaagactagataattaataaaaaacagaaatttatctcacaattctggtggccaaaaagcccagatcaaggtattggcaggattggtgtctggtgaaagcaactgtctgcttccaagacggcaccctcttatattctccagaggggaggaacactgtgtcctcacatggtgggagaaaccaaagggcaagagagtggtcctttcagcctggagctcttttataatgttgctaatctctttcatgagtgcttaatgcagtgatgatgacttaatcatctctcaaaagccacaccttttaattctgttttattggggattaagtttcaacatgaattttggaagggggcacagtcaaaccatagcacgcacttttgtgaatagtaagcaatattcatatttatctatttaatcatattcatacctatatttatctatgtactaaactatactatttatacatatctatatctatttactagaaagacagtgtcactggtcacagtattaataggataagcatttataatacatggacttggtacactcagtatatgcaaatgctctttgacttatgacaggattgcatgtttataaacccatcataagttgaaaatatcataagtcagaaatgcacttaatacacctaacctacctaacatgatagcttagcctcacctaccttaaacatgttcagaatacttacattaagtaagtattacttacctacatttggacaaaatcatttaacacaaagcctattttaaaacaaattgttgaatctctaatggaatttattgaatgctgtactgaaagtgaaacacagaattgttgtatgggtacttgaagtacaatttctactttttgcatatggcttttgcaacatcataaaataaaaaaaatcacaagctgcaccatcgttaagtaggggatcaattgtgtgtatcagattttggtatatttttgttattaaatattagctataaactattaaaatattaaaaaacaaatgacacacgtaactgtagattgcatcaattttagaatcaatatgtctgtaagaaatttaacaattttccctgctgtgatttataatgaacacattgcagctttttttagtcatgttcaattttagaggaattttatttaaaaataaagattctaaaaactatcataaatatagaacttggcatataataaaatttatattatatataatgcacaataatcctacctctgatgttttaatataaatatatacctcagtagatatttccatttcttttgttttaaattacctacctctggatcccaccagtgtagaatttctcctgcctaattgatccaaaaaagtactcaactctgttattagaaataagagtatatgcatatataaagaatatgaattttaaggatgttaggatgtatacagtggccctaggaatagtgacccaaacaatgactttatacaaattctgagtctagctaccagcgaatgttactatttgtatttgacatctaatataaataacctaaattgtgaattgtatttaatgcttactgcattttactgctgtttctgccttattaactcaagacatcatggggcagttatcatcttcattttatagattcagaaacatagaataggcaggttatatatagaaagaaagatccctaaactattgtcagaagcaaatataaaagaatccttaagcatctaaaggaaaaagttgagcatgatgaattagaaaccaggaaaaaaaaattactttagatgtgcagccagattttttgcttcatttttaaccttatagaatttcacaccagttttgggtaaggtggtagctagttggtctactaaaccctgttatttctttccttacagactaaactcatacatagaggtcacaagccatatctgaatctcattcccaaacctctctaatgctattactttaggcaagttacctaatctctttgagcctcactcgtcaaatagaaataataaattttagtgggttgtcataaggatcaaaagggataatgaattcacatataagatgatgaaaacctacctggctttttataattatgagttatattattgcctcctcttaaaggccctgtgacttataacatagaatttgacagagtgcttgtggtttaattaactgattcattatttcagcattaattatcatctgttgtatgcaaaatcactgtagtagatacttagggtgtacgtgtgtgtgtgtgtgtgtgtgtgtgtgtgtgtgttggatacaatcataagaagctttcatacagaatctgcttaaaacttgaatccagtagtcttctttttaaaatgagcccaattacaatgatttaaaatgtgctattacaataacatatccctatttaacagatatttaagtctaggtagaagtttatgaaaatgatatgtgtcattttttctcaatgtcagatcatttcgtttttaagttaaaaagatggcttgttggacacagaattaaaggatggatttttggttaggtttttcatgcctgtagtagaagactattaaatatattctatttccatctgagagcaagagttttgtaatctaaatcacctaactcttgaaaacagtctgcttattccttcctttgtaaacttctgctaacagtttaatatttctgagcctcagttgccttagctattcgatgaaaccagcctacatcacagtgtcactctaaagattgaatacataactctggcaccacttgaagacagtgtctggccagtagttgatcctccataagtgatatccatttgtttcaagataagtgccctttcttcactttagtgcagatgctactatgttctgagtacagttcatcattctcaaaggatcttttgatccctgtttatacaaaagcgacaactgaataagaatgcaactgtgtaaatatttacttacttttaaatttaagagtaggtagttgcttattttaatgctctgggtgagattaactaaatgaatgaacatgacatagctagtttaatatcaaattgttgatgctttttttcatgacactatctgagtaattatatttacattagaaaggcaaattttaaaaaatgtagcctatgcagttttgtgatataaaggcctaagaaatggtcaagaatctactctgatgcactaatttccaagatatgcttggccaatactttttaaatccacattaataaatcagaagaatgtttcagacaaaaatgaaatgaagagttttagggtgaatttgcctaacggatattaggaattctcctgctttattatgcagaggaaatattatgttgatctttcatttgcctttctaaaagaactcatacatattttattcattaatcttcagaatgccctgtgaccaaattgaaccagaaggggaaagtgaagttagtaaacagacacagatgttgaaatggtaccaaatcgatccttcataaaaaacctcctatgtattgctattcattcattcattctccaaatatttactgaacatctactctatgcaatgtatggtattatatcatgtgaaggataagaaaaatataaataaatagatagattacatgatgtttgcacttgaagaattatcagtttaataagacaagtgaaacgtagccttaaatcattggaaaaaatatgctggcatgcagtgagaaatgtatatagaaaacagtgcatttagatgagcatttatctactttttgtttaggatataactataactttacataaagacacaacttgagaatgttatgtgcccaattaacatgaagaatggttcactccctttgtagttacctcactggacttggataaaattctacattcctgtgataagtcaaagaaactcagaaacttgatcaggttgagcagactggttgatggaaccacaggtttcattgtaagatgctcagcacatatgtactctattcaagctagagaatttcatagctgctgccaggtttgaagtactccagaaagtgctaccacagtgctagagttactgccagacctggggtcctggtatttctgctgaaaatatggcagtcaaatggttatctctgtttatcctttcttccattgccttgagtgttgaaggccatttttgccaattgtctcctcacatcctgtctggtcactcatcactagtactagagctcaaatttactctcaaattgacctggactcccactattccagctgtttagttatctggttctttatgcaacaaaaggcacctctgagtctgcccatagtggctgagttaggacccccatatcagtcaaaagctatttccagatccagctcttctctgagactatcaggccttgtctacactgtacttactttcagctgagaatgtgttctctcacctaactccacttgagcatcctcagtccctcaaaggtaccctggattgtggtcttgattgtttttctcctaggagtttctttgattctttgtaaatttttccactttctttctagcaactttcaagccctgggtactactaaggagtgaaggacagagcagtgtctataaatccatgtatatagttgcaatgtaagaaacagaggagagagtagtctcagtaaagccaaatatacatggctaccagagagaaggtgcaaagttgactttaatctatttaaaagaaaaaagtcactaaatgaatccattcacaatatgaaaacctacaccaaagccgggcttggtggctcctgcctgtaatcccagcactttgggaggccaaggtgagaggactgcttgatctcaggagttcacgaccagcatagacaacatactgagactccgtttctacaaacaaaatggaaaaaattagcctggcatagtttcacacgcatgtagtcccagctctttggcagtctgaggtgggaagatcacttgatcctgagaggtcgaagctgcagtgagccgtgatcatgcaactgcactccagcctcagtgacagagagagactctgtctcacaaaacaaacaaacaaacaaaaatccctatacaaagagaatttgatatttctatcttttcacatagaactaaattaataataataataataattgttattgttattattttagcatcactaagtacaggacacccctgctataaacgttataaaaatttgacagtttgatgttattggaaaaggaatttgggggaagatagggctcaaactgaatctcaagtataaatataaacataaaatagcattttgataaaaatagatgagagtaggaaggccatttaggaagaagataatggaaagccattaaagatgttagaacaggagagtgcaataaaagtaatatcatttaccatgccttgctaaatatcatgcaatttgtggtgattatataaagatatgtttgccttacactaactcgaagtctcacaaaaatgctgtaggatgagcattatttctcacttacagatgatgggactgaggtgccaatatatttagcatgttgctcaaggacatttgattagtaaggttaaggctgagcgtttaagatcagtcccttctaacttgataacttgtgcttttcctgccctatcctgcttccaggaaggcatatctggtggctctgtgtgaatgcataagacacactccagcaggtagcaggcttcctgcaattcaagcctgagttaataaggactggtatagagcccagggggctcaaaggaatgattgaatgggaagatctttttgagatagggaaggatagtacggagacaaaagaggccttagagctttgcagcttaggtgactaggaagactctagtgcttttcaccgaagtggggctattgcaaaagcagggagcttgaaaaggagatggtattgattgcaaacaggaaaatttgagatgatggtaataccttaaaggaagagaggtccaacaaaaagctggaagctgaaaaattgtttctcatttctataatgactcagttttctgtttgtttcagaaatggagaaaaaaatttcagacttttgggagcatatgtttacaatccttcagagaaaaagacttagtcaacctatttggccacctagactaagtgactccagaagctgagagaatttaagtagtgttgaatgtcaaagaattactgcatactttagtgcccttgtttctcagtagtcatgccggaacagcctgtgccttcgtagtacctgtgtcaggggtcttacgaataatgccttgggagaagagatgttaatttgaattctggttccggctttcaagcaaaatattactcttgctaatgttgtctatcaaataaacttctcagatttcattcgcagccttcaaatatttattcctatttccaatttttttactaaatcaaaaggaaaagggaagtgaataagtgataaattaaagactgtgagatgtctttaaaatatgaacttctctagcccctaaggcaggtgcacatgaatttaactgacaaaaattatgcacagttttcttgatttgaaagtctcacttaagtgttattttaactaaaatttgaaacaatcaaaatctcaaggtaaatatagatattactcacttttaaaacatcataatttgaacatttactattacatagatattatgtactgtagcaaatttgtaagctataaaaatatgtggaagacaattacaattttccatttattaacataccaagcaaagaaaatgacaattatcattttaaggaccagtagaagttctcttaacccaccttcccctaaccgatttgtaagagtaaccaaagctctgtatccactggttaaaatatactgattgacatccacagaagtgagaaaactcaccatcaggaggctactatcatgtttctgtattttgactccgtggtttggtattcttagaaaaggtcagtagtattttttctataaccagtttatgcttgttgtacctactaattcataattcaattaaacattacataaaatagttaaataaaagtgcaagcataacattgtttctatgaaaactcaaatgactgcatgaaaaaaattgataaaggtactttgcaagtatctctttattcttgtttcacttaaaagaaacaagttgaaaatcatggataatccattatgtttggagcttatgcaaaacagaagaggaaattcaatcagcagacccatgaaaaaggtcttggctctacattaatacatttaggaatacatttacagttagatgttgtacattaacatagaaattttgaagtatatatgccttaactgtttaactggccaaatgttagctttgattactttggaaaattatttataataaattttctgtgcccttgtacatatttcattaaaagtaggatcttatggtatacacagcttgcttaatgttttcttaagttaatttaacatttatttaaaatttgctatgtctcaagcactgtttttggaatagagctatagtggtgacttagatggagttcaccttctatgtggtacatagaaaatataaacaatgaaagaaaacaaattaggataagaagatggagagtgatttaggagtggggaaggccctttagctagggttatgggagaaaaatatatgtggagtaagtcctaaaggataagaaataggtagccatacaaatattgatcagaaaagcatcctaggcagaaggaacaattgcaaacttcttgagatggaaacaagcaaggtgcatctgagggaaagaaaaggtaacccagcacactgataggttgcctttctttcataatttgtgatgagaaaaatcaagggtatccttttgatgcattatatttgaattgcctattagatatccaagcaggaatatgcagttttgtttactattgtattatttgagcctctaacagtatttggcacattaataggcattcaatcaatatttgttgagtgaaggaaggaattattttgggaaggaataattttgagatgggtaatgttttacgagtttgaaactcaggtgaaaggattgtagaataaatttgtgagtcattagcacatagataatatttacagctaagaaactggttaagattatccaagggtatagtgtgaatagaggagtgccaaagagtgatcttagaagtcaagaagagaaagagaagcaaaggtgattgaagatgtgcagtaaggtagaagaaaaacaaaaagagtctaatttcaggaagactagagaagaaagtgttttgagaaggacatggtcaattgtgtcaaatcaagctatgagaactgcttaattatggtaagcttgaagaactaatcattttgatttgacacgaaagcattgttagcgacctcaatactattgtctgcttggaatgttggggacaaaagctaagctggactgtattgagggaatgtgaggtgagagagaagaggtatcaagtctaactagttatttcaatggggtttcaatttaggataccatagaaatgaacctgaagagatacataaagtcacataaattttttttaaacattgaattaaggcatgtttatataggtataaatattccagtagagaaggaaaaaataatgttgcaggaaagagtgaagatacttgcaaagctgaaatctaaggaagggacacttagagggagttagtcttagatagaagcagggattgtttattgcattataaaaaaaaaaagaagacagagtgtggaaattcagatgcaggtgggtggatgaatttgggcaggacagcagagtagttcttgactcattttctccattttattagtgaaaaatgaagtgagtataccagcagaaatggaattgaattggaagagaaatttagaaggtttaagaaggggcaataggagcaaaattatctttttggaaagtgggaaagtgaatattctggggaaatatggaacattttctgggtttatggcccacttgagattaggggccataaatgttaagtgatttcagttaactgcatcctactaaacccagaaggacagttaagtcagcaaatagttaaatttaatgagtttaatttctctaagagaccatgatggagaataagacctaaaagagttgccagtatttataaacaaataattataataccaaatcatagaagttagaatggaagtaagggaatgtgtgaggtgctggacagtgaaaatgtggattgaagttctccaagggggtgaaaattaggtggaatagggtcatttgagtcactgggctgggaggataggggatttgttaaaattaaaagatgcatgcaaaaattaaaagatacaattaaattttattaagcaattctaaattgtcttctaaaattgctgaactaatttatacactctccaatgtgtaccatactattattcattatgtttttaaatcaataataattcttagaaagttatttagacttatttgtttaacaatttaaatagaattgaatctcgccattattttgtgggctagtcttttttcagaatatgtagcctcctcccttctccccaccccccgaaaaaaacccatgtaacagaaatagtaatagtaaaggaggttctttccatgaaacaaatgtggaatttttaaatatgagcctctaatattttatcagacataatttctttacacttcaaagatatcaagtgttttattataactaaacaaggaaacattgagttctatcatcttcatttttaaactattaagtttctctcaacagccaaaattgataataattataaattggcctttattttttatatataaaatgtatctatatccacatttctaactttcatatatatttatattatatatttatatattatattacatatatttatatttatatattatattacatatatttatatttatatatttatgaatgttaaaatgtaatatagatttttgtagaattttatctccttctgagaaaccatgtcataaatttttaagtttagattacttttcttttaacttggtttttaatttggaagcaggagcttggcattaatgtgtataacataacctgaactattttttcttttcttgagaaatgtagccttgtcttgcttgcttagtaaagtaatgcaccttaattcagctttgttatccttcttcttcttcttcttttttttaactgtagcctatttggtagttcctttttcctgtgaaacatgtataaagttctacaaaaataccaaaagtttaccatatttattgctaagatgcaggtatactacattacttatcctcacatcattagacgaaatgcatatgaactctccttacaactgggtattgaacttcactggtcattggttattagaacattttcttttaatgactgtatctttttgtaagatacaggtgttactttggagagaggtaggaatagctctatggaaaatgtacatgtacatgtggtggaatttttcctgaaattaaaggaaacatgcagtttggtcaaatgcatcaaataaattaaaatagtgacggttactgcaaccgaatctgctgtcttaatatgctatcaatgtaaaacagcaatcatttataattgtcatcaaatgacaaagttaagtgtgataagaatattttgcacaccaattaatttttctatcagttttgatactttaaaatgttgaacatacagttctttaaactgcattgtttcttttttagctgtttaaaataaattctttaagaagtgcaacaataaaaaaacaaatcagcaatgttaaaaaatatgtaaggagacatgcagattttaatcttcttgttgctactgtattaaatattttgtccttatcaaaatgtatgcacaaaaactggacagaatatgcttctgtgatctttagcagctctgtattgccccataaatgactcagctacaaatcagtgaatgtgcttcaggctttgatttttgttattagttcaaagatgaacatcatgaggacatcactcagagacagatttatcatgttttgtttcagatctcatagtgaaagctgaattttcttgtctttgttctaccaaatacattgctatatacatgatagtttaaaaaaattaaacctttttgaatatgctagagaatattaaccaatgcataataaaattaaatcaagtaggtgccatcacagtctaaaaatataacacccgatatatgtctgttgacatatttgttattcaaattcaaattttctttctcatattgttgtatatttacaaatgtgtatctatactatgcaaacattgatgactttttaaaatttattttatattatgagtatataataggtgtatatatcatcaaatattgtatctgtttttctccttcatgaaacaaatgacaagatgagattagatgcacaacagatttattggcagatatgcctgtgaaagataaacaggcaggaggttagaatagacagttttcagaccgtgctataggtctgaaacctgtaaaaggagagagggaagacaggattggatagaaaaagtctcagacaactatgccaaaattcttagccaggccaatggggattcctagagccacagcttttcattagaggaattttgtacaggaatggtcttgttctagcaaggctgccaagctcaatcactggctggaagcagcctatctgaagagcagcctgctgaacacagtggtgtatgcaaaggtgcagatgctagaggctgtccttcagttatgttcctagtagcagtttcagcagagcttcttcatagtcatcaaatatatgtattttgggcctttcagtgaagttgttgctaagaagatatggattttctttcttaattttcttagttaatatgttcaccctaataggccatgtcctataagtgtataagtgttattaggtaagagaatgaagatggattctgtggctgcatcataggctctgaatttaaaaagcaacaacaaaaaccttactaaatcaaatctcaaaacatatatcctgattgtggggcagtgtgggcttatagatgtttgcaaatgaataagcacatattctaatttgactcataatgctgttaagaaacaaattcataaatgtaagatagttattgcatttcaatgaggcatgccagcaatgttcaacaaaataggggaagaaacttataagcaagtatggaaaataatacagtcagtcagcaaggtacataggtttaataactgagttaagaatatccatatgacttatgtgtgcagtatacatatataaatatattcttttatatacattatcacaattcttttatatatattatatataatatataaatatatatataaattcttttatatatgtaatagaattgtgaaaatatatatgtgtgtatatatgtatatatgtgtatatatatgtatatatgtgtatgtgtgtgtgtgtgtgtatatatgtatatatatatatatatgaattgtgataatagtcccccagaaagtaaaattctgcaagcgggaaaagagtgacaaggcactcatactcagtgagctctggaaaggtgctcaacttactttacctgaattaatagatcataatttagcatttgatgtatagtctttgattctcaccaaaaaaatcagaaagattgcaagatctctcagtagttctagatgagaattcattgttatttttcgttatcattgatcagtaatatagatgaaagctcaataacgggttacagtgaatgttcattgaatgccaagcactgtgtttggtactgctgatacaaaggcaagtaaatcaagtgttacctcttcccttgttaattagttaaaattgcattcattcactccttaagcaaaaataatatatggttcccagttgcttttctgggcattggggatacaacagtaaataaatgttacagacaaaataaatgaatgaaaaaataaacaagtcccaaaatacaactggatagcagctgtggaatttttcttagtagatggaatcttttattccgtatttaacactattaaattccttaatagactacaccataaactctacaatatagagctcaacttgagatacagaatgtttaaaagagaataaaaacttctctgaagaattccattgtttaaagaaatggaaatcagcattattcaacatttcttactttatatatttaaaattatcttaatcagttgctttttgtgatactacattattattttaataaaatatataaagttggatgatgataatataactcttcaaagatacttctgttagtggtttgatatatattttttcataatttttagtgagtaaatccatctacacatacatttttacataaatttaatttcatgcccattgtcactctttaaaatttaccttcttttaaaattactacaatatatgggcatatgctaatttactgataaatatgttgattgtcttccgttacttaataaacaattttaagaagaatctgtttttatatatatgaatctccataagagtatttatattttcttaggatagattcttagcaagggtacacttgatcaaaatttctacatattttaatttttgacatatattttcaaatggctattcaaaccttgtctaacagttttccagtttttcctctgctataggttgaattatgtcaccaacaaagatatgttgaaatccttacccccaggtacctatgaatgtgatttcaattggaaatagggtctttgaagatgtaatcatgtcaagatcagctcattagggtcggccctaatccaatataattgatttccttgtatatattattacattactttgtaccccataaatatattgaccaccatagttagtcaatttaaaatttaaaaataaatattaacgataatttaaaaataatttttaaaacagaagagggaaattggaacacaggcacacacacaaggagagcaccctgtgaagaacagacaaacagggagaacacaaggtaaaatggaggcagagattccattttcactgcaagccaatgagtagtagctggcaaaacaccagaaactatgagaaagatataaaacagatagaccgtggccctgcaggaaccttagtttggacttcttgcctccagacctgagaaaataaatgtctgtgttttaagccatcctagtttgtagtaatttgttaaggcagtccaggaaaactaaaacccacctctaacattttagagtgcttctttaccctcatagtcaccaaattgagcattctcactactttattactctgtctattagaaaagtaaaattacaaagatacctaatacatttaaaactaaatgaatctcattagataaaaggcagagaagtttcacatttgtcatatatatgcatgtttgtctatttaccaacatacttacctgttatcctttactttgttttataaaaggatttaagcagctattctctagttaatatagaaaaaaaatgctttaaaatggaaggaaaagaatcttccattaaagaaatagataggtgtcatcctcccagccaaataactgggctttgcgcggggtaggtatttaagtttatggctatagcagtatctggattgcagggttcaaatcatatgtttctattttctggctaacctcttatctctcagcttcagggtttggcatagacctaggatggcacagaatcatctaccatttctatgagatagaagcctgagaattcttgccattaacgttcagcctttctctcataggggtttgccttgctgctgaaatacgcagttggtctagatggaaaatagctttctgacagtgtcaattcaaggatgttctgagtttattattaactctgggaattatatcataagaggcaaatactcctacaaaacattgatcaatgccactgttagagatacttggtcttaggttgatttgatcagaattacatttactatgttttaagtacaagaagagccctctgatgttcctcattgtggagttcttttcaaatagaatgcattgtaaatgtcatctcctgtgatgacaaggcagttgtagagtgtaaggcagtaaaggtgagatggaagaacaggggattggcagtcagaagcctgcattctagttgtggctttgctgcttactggctgtgggcctttggaatggtgagttgaacttctgtgttctcatcagtcaaatgggctttgaagtatacctcaaaaggtgattgtgaagatcaaatgtgaccatgtttatgcaagtattttggaaacatctagcgttaaatatatgtaaaatgttttcagttgcagaaattttagtttgaatcaagag

SEQ ID NO: 31 - DNA, 70800 bp, Homo sapiens
aaaactaatgagaataggaataaattgcagacttttggctcttttctggctgacagggtttaagtaacaccaacatgccacactctggagcagcaggatctttatttttggtgccaactcctcatcttgcaacaagtgagccacttcttccatgtactcagctgcaaagttcccagcaggtggtcctcctgtaaaacaagcatttgcatttccagaagtatttggtgtatctattagctagtaacactttggaatgcttatatgttcatattcttgttgccctgtagaggatactttggatactttgaattttcctgtcgttttcccccacctcccacgctgctgccatgaagaccagaaagtgtgtgttgataagcaagcagtgatatgaaaaacctgggaaggtctctgcttgctggtctcctccctggttcctttaagcaagcacccaggagtgagtatttctttctttccttttttttttgagacggagttttgctctttttgcccaggctggagtgcaatggcacgatctcagctcactgcaacctctgcctcccgggttcaagcgattctcctacctcagcctctcgagtagctggtattacaggcatgcaccaccatgcccagctaattttttgtatttttagtagagacggggtttcaccatgttgatcagctggtcttgaactccagacctcaggtgattcacccaccttggcctcacaaagtgctgggattacaggcgtgagccaccgtgcctggccaagagtgagtatttcaaggtgaataaaacctggttgtgttcgcttagcaaatatccctcatccaatgaaatgttatcagaattttaagattacagctaagaaaaattactaaactacagtgttataaaatgagtgtcgtgaaacactcattttagcacagccatttagatcagtacctgtgaaggccagcagtccaattttctgggcagcttgagctctcttctcaatgggtagagattcattcatcaacacttggccaagtacaacaattttttcctcatgaaaataagtctcagctgaagggatttttttttccttcttcttaacaaaaaagcccttaacagtgacacgccagaatttctggagacgccgacacagccccgcaaaatacccatacatcttaacccaaatttgcgtacaagaaaatcggctgttagccattgtgtaaaaaggccagtggtccttcaggtacaccactggcagtcacaggagttcacagtcaagaactctggaatgcatcacttagcaacactgtggaatggaatatacaaaccaggggaaagcaatatatgcctaaattcttcagcttgtcattgaaagccttctactatttggactaaacaattttactttcatttctctggtgtacaaaacctcaacttaaacttgtttcccgtaatgcgcatgaatctcactactgtctttgaacctttgctcaggcagggtatatttggaacttgcccgttctagtctgattattcccacatgtactttgcttctttccattgatctttcatagtattgttacctcttttgcttgtttgctacccaaagagagttctctacatcatagatttatcttattttgctgagaaaatagaagcaatgaaaagagaacttgcataactcttaccagtgcatccacccacctatctgcgtctacggtacccatagactctgtctttcctcctgttactgtggataccctctctgtttgtgcagtagatgtcaatcagctcctctcacctcactcaaggatgttgctcttcggttcttctcttatcttggtaatttttccatctcaactggaccctttgcattatcaacaaacacgctgtgctttttttctcattaaagaaagaaaactctcttgacttcatatgctttcttcccacagcgactgcacattcacttccctgctctcctttacagtacagctctttaaagagctgctatactcaccatctccagtctttctcattctttcttggatgaattccaaacaagatttcaaccccatgactccactgacattgcctgtcagggtcattgaattgtcagtctttgacatttgacactcctttctctctgaaacacttttcacccagcttctaagataccacactcctaatttttctcctcctggccactcatcattttcctttactggttcctcttcttatgacctctaaatattggagggcccaaggctcatcagtctttgtatgtgttcttcttttcttttcttttctttttctttttctttttttttttttttgagtcatggtctgtctgtgtcccccaggctggagtgcagtggcatgatcttggcccactgtagcctcgacctcctggactcaggtgatccccccacctcagccttctgagtatctgggaccacaggtgcacactaccatgcccagctaaattttttgtagggatgaggttttgccatgttgcccaggctggtcttgaactcctgggctcaaacaatccaccaacctaggcttcctaaatgctgggattacaggcgtaagccaccatgcccggtccttttttctttatctatacttcctagataagatcaagcagtttatggctttaactattacccatatgctgaagactcccagttatatatattatatattatatatatattaattatatgtatatataattttttttgagacatgttcccctgttgcccaggctggagtgcagtggcccaatcatagctcattgcagccttgatctcctgggctcaagtgatcctcctgcctcaacttcctgagtagcagggactgtaggccaccacacctagcaaatttttaatttttttttttttaagaaatgggggtctcactatgttgtccaggctgttttgaactcctagcttcaagcaatcctcccacctttgcctcccaaagtgctgtgattataggcatgagccactacgcctgctccaattttatatctttaactggatttctcacctgaactccagactcgtattcagtcacaagcttgatatccccatttgaatgtccaagacgcttttcagttttaacatgtccaaaacagagttccaggtcttcctccctagactggctgcctctcagtttctatatcttggaagatggtattacatccttctagttgttcaggtaaaaaattctagattcatccttggcttctatctatctcacatctcattttcaacttatcaatgaatgtactggctctactttaaaacatatcccaaatttgagacattctacagaatatacctacatatgctcttcaaatattttaatgtgtgaaggcttaaaaaaattggggttactctgctagattaaaagagcctgagagacatgacaactaaaataaaaatgtaggccgggtgcagtggctctcacctgtaatcccagcactttgggaggccaaagcatgtggatcatctgaggtcaggagttcaagaccagcctggtcaatacagtgaaaccctttttctactaaaaatacaaaaattagccaggcgtggtggtgcacgcttgtaatcccagctactcaggaggctgaggcaggagaatcacttgaacctgggaggtagaggttgcagtgagctgagatcatgccattgcactccaacctgggtgacaagagtgaagctccatccccaaaaaataaaaaataaaaaaataaatggccaggcgcggtggtggctcatggttgtaatgccagcactttgggaggccgaggtgggcggatcacctgaggtcaggagttcaagaccagcctgaccaacatggcgaaaccccgtctctactaaaaatacacaattagccgggcgtggtggcgcatgcctgtaatcccagctactcgggaggctgaggcaggagaattgcttgaacccaggaggcagaggttgcagtgagccgagatcgtgccattgcactccagcctgggcaacaggagcgaaactccatcttgaaaaataaataaataaataaaaataaaaatgtaatccctgcttggattctgtacataaacacgtgtgtatgtgtctctctgtgtgtgtgtttgtgtatgctataaagggtattactgggacaattgggaaaaacagaccttccttgtccaataaggtagccacacatggctatttgaaatgtgactagtctcagttgagatgtgctgtgagtgcaacatgcaccctggactttgaagacttagtaggaaaaactgtaaaatatttcaataatttttatattgatcatattttgaaatgttttacattaggttaaataaaatatattattataattaatatcacctgttcttttttctttgtcttaagtgtgggtactagaaaatccaaaacaccaagcatggcctcttttcaaggcttttgtacttactgttgtgcaggggagaaaacatcatttctttttttcccctttttacatttttagttgagacactgtcctgaaaataaaagtcagattaacaaaagaaaaataaacggaagtttattaatgtgtgttgtacccaatgtgcaggagagacttcagttccaaagtatttctctctctaggcagtggcttaggggctttgcttaaatagcattttaactaagagccatgaatcctatctagtgacaagacaaagaaaagaccatcttcaggcttccgaaaggtgagaaaatgcctgaaggtaagttgatgggaagagtaaagtctgttcctgggtcctctggcagtgctgtctctgagctctggttatgagctgaccaaggcagaaaggagtggcagaatatgtccctgttttaaccttttcactataatctccagcattttagagaggaatattttagttgcctccagttgcctctgcctggaaggttcttcccagagataatccacgtgactcatcccaatagctcctcgggtcattcctcaaatgtaattttctgtgaggcctttgcactcctttttttttttttttttttttttttgacacagggtcttgctgtgtcacccaggctagagtgcagtggcacgatcgtagctcactgcagcctcaaactcctgggctcaagcaatcctcctgcttcagcctcccaagcagttgggaccactggtgcacgccaccacgtccagctggtttttaaaatttttgtagagatgggagtttcagtatgccatgcagactggtcttgatttcctggcttcaagggatcctcagccttggcctcccaaagtgctggaattacaggtgtgagccactgtgccggcccctgactactctctttaaacttgtgatctttgctttctccctgtgtctgtcttcaccccaccttgtgcaatcatttttccccttctctgctttgttgtcttcgctttgccaggatataaggcctgggagggcagggattgttgtgtcttttatttttctctactactctatttccagtgccaagaacagtccttggcatacacctcgttcatagtaagtaagcaacaaatacttgttgaatgcatgagaagttagagttctaatttttagcaaacaattattattccttgaacaaggtgtacttaggactgtctcaaaatcaaaagataatatttgtttactaagaggtactgtctccaggaaaagtcagggataaaagtattttatttgagtttttctgatacagcgagaagtactggcatttttcagtgaactaaggtttacaattttactttacaattttgtaaagtaactaaggcaatttagttaaacagtatagtagcaaaccttatagaggaaaatgtttgtaccactgactcagtaaaagcaatcactggtatttaacgagtcacttggtaaatactgtcagagttgaaagtcaagggcttctttgtgatgatgctggtggggtctgagtgggaacagaacatacacaaatcagtgaaggcactttttatttttttttccccgaaacagaatctcactctgttgcccaggctggagtgcagtggcacgatcttggggtaagccaccatgcctatttgccctcaaggagctcacagtctctgctcatagatacaacagtgaaacttagctgttttctctccaattagctttacaacaaactgagatttattatctctatttagagataaaggaatttcaaattgaaaataaaagcacgagctgtggtggctcacacctgtaatcccagcactttgggagctcgaggcgggcagatcacctgaggttgggagttcgagaccagctgatcaacatggagaaaccccatctctactaaaaatacaaaattagcagggtgtggtggtgcatgcctgcaatcccagctactcgagaggctgaggtgggagaatcgcttgaactcgggaggcggaggttgcggtgagccgagatcgcaccgttgcactccagccggggcaacaagagcaaaacttcgtctcaaaataaataaataaaataaaataaaggtgaaaatgaggtgcagtgtgttctgtaaataccaactcagaaagggcatgtgaaaaaaaataacatcagactgcacatgatgctagtaattcaaaaataatttttattttaacttacatgactgaaagatcaatgaatacaaatgccacacaactaaaagcacccctcaaccaaacataaaatacagaagtgaatacaaaagatctggaattaattactcatgcaatagtcaaaataaaaaataaaaaaatgacaaaccaaacacaaaatcctgtaacatctgtgtttgactttctataaaaagaaccatttcaaccatttaacataagctataggctatacctcctaactacagactgtacaatgtacctttaaagtgaaggatgtatgaatatatataatatttataaatatacagatatgtacacgataagttcacagttgaaagaaccatttgccagaagcctggcaaacaatttgcactttgaaatgaaatgagtcctttttaaaagtcttgctaaaatgtaaatatttaaaatgacatctaaatgatacaaacacgtccatagtacagttgatattccacagtttaaattacactcacatatattgttttgataccttggcataccccaccttgtacactctttagaggaagaaaagatattttaataagagctactgaatggtcttgtactttgcttaatgaacttgcatctctgatactgaagcaataatgggacctgatgtttgaactatttggccagggaatcctaccagtgagtgatttccctgggggcagtaaccacccctcaggatgtccttctttctaatcccacggtcatttttacagaaggagggaccactttaaatgttcctccactcctactccattaggatttctctgacttctaggttcctccacctcaaagagcatcacaggtttgtgaatctacagcttttggttttgatttgtcttagcagcaaaacacccctatggtaagaatatcataaaaaatagctctcattaattaaaaaaaaaaaagcataagctttgagttttttgtttaagtgtataggcataatcttaatgtagttcttagtcatttacttatcatttttccataatggaaacatgatttgggaattttcaggatggggaaaagaaacaaaataaattatgggagttttttgtttttttttttgagactggctctcattcctctgtcacatgggctggagtgcagtagtgtaatctcagcttactgcaacctctgcctcaagtgatcctcccacctcagactccagagtagctgggagcacataaaattaaaacatctaaactctcctaatgggtcattttgccaggttctgcaggcaaacttttatttgaagatattcttttttgtgctttgtattgaaagtaaagttaggtagctaaggggactactcaaccctgagaacacgaccgagaaaaactgcaaggcatatgatgtttgtcgaagtatcacatgactatttcaagcttatagagaaacttgcaaaaaagtacaaagatggctatttttaaatttcatacatattaagataagatggactctttcactgagtattattagacacaatcgacgatgtaatatatttgaattataccatagccctattctatattggccaaaggaaaagtagataggtactgtgaaacgagactctgaattctttctataacatgtttttttagttgttgttgttgttttgttttttgagacagggttttgctctgtcacccagtctggagtgcagtggggcaattatggctcactgcagcctgaatcttctgggctcaagcaatcctcccaccttagcctcccaagtagctgggactacaggtgcatgccaccacgcctgactaattaaactattttttttgtagagacagggccttgctatgttgcccaggttggtcttgaacctcctgggcttaagcaattctcctgcgttggcctcccaaagtactgggattacaggcatgagccactgcacctggcctacatttttatttcagttgtcgtgtctctcaggctctaaacaatttccagcccaaaccacagcaccatcctgatgaaaagggccagatattaagacagctgttaggcagttaacctgtaattaaaaggctgtggcaacttcagttccatgacgacctccgactttaacacagtctcgaggaaatttgtccaattgttcatatgccagccgcccatcttctcctaaatacagaacattaaacatgaataccaattcaaacaacgtttttattaattactcaaagtaacatagtgccatttgtttagggatgggttgctataatatgctatgctaacttttggtaaggaaaagttatcttttgttattcctaattatgtcattgttttccaggtaatgcttagaacaaccaagaacttttgagctaattaatgccagagaccaaaagaatgccagggtatgaaacagagtagaagtcttatggccatttgatgttgatgatttcatataatcgatttattttagagcaattgtatggattatattttaagtacattagggatttcaatatggctaatgcactgaacttttacataacttttacttgtatacattatatatcgatacatctaaatgatatgtggtaaaatcaatcttaggctttcaaacttcagctaaaaattactttttactatgtaaacatacagagatgccttctaccagccaccagctagttcagttttgtccgtaacgccaccttgaacagttaggatgcaattgcaaataattttaatgttttgttctatttttctactttaaaaaatgatttagaaaatgagaaaataaaatgcaaagacaagtgataagaagcaggctttcatacatgtaatgcaagtgagacaaagatggaaatagttgtgcctaatcagaagttcagctgggtgtggtggctcacacctgtaaccccagaactttgggaagccaaggtgagtggatcacttgaggtcacgagtttgagaccagcctgatcaacacagtgaaaccccatctctaccaaaaaatacaaaaaaagagttagctgggtgtggtggaatccacctgtagtcccagctacttgggaggctgaggcaggagaattgcttgaactcgggggcagaggttgcaatgagacgagattgcatcattgcactccagcctgggtgatagagagagactccatgtttaaggtaggctaggctaagctatgatgttctgcaagtaagatgtattaagtgcatttttgacttaacagtattttcaacttacaacgggtttattgggatgtaaccccattgtaagtcaaggagcagctatcctcaaaattgagtaaacttaaaacttcagttcctccatggtggcaaaggtgaacagcccaacagccatttaggatggctgctgtcatactggacagtgcgcatatagaacaatcccatcaccatggagggatctgttggacagctctaggttaaaatgtcgaaatcattccatactagttggtaaatagttgcagccctgagtcctttaagtgcccgcaatgaccttctgccctttgtcatagggcattttatcaattcctattgaaaatactatcctcactatattaattcagtcatttgtgtaagagaaaaatgtgccagtatttgtgtattagggtcaaagaagattcataatattgacttcaggggggtctcaaactttatattagaatcacctgggaggcttcaaaaaatccttaaaaaatcctgatgccaaggaacacttagaccaatgaaagcagaatctttgggagtagattgtttaagcttccctggcaaatgtgcagccagtgttgagcactgcacactggtggtgtgagagggcccagggctgatatgagcagtgtgcatgaagagctaaggtgaagcaggtatggtgatggcttctggagatgctgctgtttgcacagctccagtgaggcccggggcacattctgtaggatcagcttccttaggttacactggaaatagaagcttcgttggctatgctttataagcgcctggcttaccttcatggttattttagaatatgaagggataaaggagtttaaactaataataccttggtacatttttagagaattaaataatttctatgcctaatacaaccataaggaataacttttattctttaaacaaatatatactggctaagatttctgtggaagaaatcatatattcaatagcagaatgaagccttgttaaacccataattgtaagaaagagggcctaacaataaatgggattttcacagtgattataaatgccatgagattcttcttcatgttgttaagttagtatcactaaacaagggtagcttttttctaagctgcagtattgattggattatgtctgaggatttctaggagcatagtttttatactttaagattgtgttgttgaagtaaaattatttataataattatttatacttttttctttttttttttttttgagacagagtcttgctctgtcacccaggctggaatacagtggcatgatctcagctcactgcaacctccgtttcctgggttcaagtgattctcctacctcagcctcccaagtagctgggactacaggtgcaccccaccacacctggctaatttttgtatttttagtagatacatggtttcatcatgttggccaggctggtctcgaactcttgacctcaagtgatccactcaccttggcctcccaaagtgctggggttacaggggtgagccaccaaacccagctatttatactttttaatacagagttaagaaaggctttccccaccctcccaagtccccaaaaaagaataaatgtataatgcctgctaggcatgaaccttcataaaataaagtgaagaggaaggattatctggatatttcagaataaaataagtactccaattcttttcttaggtatcagggctcagatgggcagaggccacagggcagtcagaggttaacctgggagtcagggtgaggctgagatacctggggatttacagcattccctgggatgcatctctggtacctcacccaatttctgtcctccagggaatgtcaaccccacctggcaacacagcctggattcctattgcctttgctttatggtttgacttctgtgttcttgattctaaatagtacacagactgatcaatccatatagaaagtctccagacaatatagttcactctcagcatccagacagaacaaggagttggggtgagatagacactgatcagttcttcgtactctgtgtgtgagaagacagcctacagcggggaaactgctaaacagggtacatgaaacttctccttactggagaagggaacatctaaatgggaacatccgttagagagtgccagaagcaaacaatcatgtaaacaacaacaataaaactcacccagagacaagagggtttctgaggccacatttctgatttcttcagtatcagattgacacaatgtcaccagcattttaatgctttcagtagcctatgggggaaaaataggttaaatcgtgttttgacatttaggtctagagtaccacgagacttggcatttcacaactggtgggaactttagcctcactttgttgcccaggctggagtgcaatggagcaatcatagctcactgcagccttgacctcctgggctcaagcaattctcctgcctcagcctcctgagtagccaggactgatttttaatttttaacctttggtacagatgaggtctcactatgttgcccaggctagtcgaattcttctgccttggcctcctaatgtggtgggattacaggtgtaagccactgtgcccggccagctggtaggaatgctaaaaaccactttacctatggggtcaaacctagctgagtgtctgaaacccaatattcctgggtgccactccggatgcactatatcagaatttcctgggatggggcccagagttcttactttcaggaattctgatgatcagctaaattcctcattccacagcacactcctggtctagaggagtgaagtgacgagcttgcttttccagagtagaatccattttccctggttctttccactgaatctcactgattccaaaatggctctaattaaaaaattcttactatttagtttatatgctaaaatagaggaggaggtaaaggccattaatgacaattcttctatttgtttgttccacaaatatttattgagcactccatgaaccagactattcataaggcatgagagattccacagtaaaccagacatggttctggtcctcaagaatttacagtctagtggattcagagtatgaaaacccatgcagatcactgtatccttatgtctttatttactttgtctgtatcacagacatctgtcactgatatatcactggatatcaggaaagcacccaaatagcaatcactgtgggctttctatttgggcacctgaaggtaattttttttttaaccaagtaacaaggcaaaatttcctacagctgtttctttttttttctttgagacagagtctcattcagtcacccagactggagtacagtggcgtgatcttggctcactgcaacttctgtctcctgggttcaagcgattctcctgcctcagcctcctgagtagctgggattacaggtgtgcgccaccacgcctggctaatttttgtgttttcagtaaggatgaggtttcaccatgttggccaggctggtctcaaactcctgacctcaggtgatccaccggcctcagcctcccaaagtgctgggattacaggcatgagccaccatgcctggccctagagctgtttttgatcacaggccattaactttttcttttgaggtattaattcctttctttatcaggcctgcagctcttttccaagattttggcaagttctaaggtgtggccttctctcattctttttttttttttttttttttttttttgagatggagtctctgtcgcccaggttggagtgcagtggtgcaatcttggctcactgaaacctctgtctcctggattcaagcgattctcctgcctcagcctccccagtagctgggattacaggtgtgtgccaccatgcctggctaattttttttgtatttttagtagagacggggtttcatcatgttgaccaggctggtctcgatctcctgacctcaagtgatacgcctgcctcagccttccaaagtgctgggattacaggcatgagccactgcacctggccttctctcattcttttctcaagactgatttgtcttatttttttgtgatgaaagtaggtcaaacattacatcttgccattgaaagggaaacatccatgtcaggagttcccattcgtttagtacttttttttttttttttttcttttttttttttttaattatactctaagttttagggtacatgtgcacattgtgcaggttagttacatatgtatacatgtgccatgctggtgcgctgcatccactaatgtgtcatctagcattaggtatatctcccaatgctatccctcccccctcccccgaccccaccacagtccccagagtgtgatattccccttcctgtgtccatgtgatctcattgttcaattcccacctatgagtgagaatatgcggtgtttggttttttgttcttgcgatagtttactgagaatgatggtttccattttcatccatgtccctacaaaggatatgaactcatcattttttatggctgcatagtattccatggtgtatatgtgccacattttcttaatccagtctatcattgttggacatttgggttggttccaagtctttgctattgtgaatagtgccgcaataaacatacgtgtgcatgtgtctttatagcagcatgatttatactcatttgggtatatacccagtaatgggatggctgggtcaaatggtatttctagttctagatccctgaggaatcgccacactgacttccacaatggatgaactagtttacagtcccaccaacagtgtaaaagtgttcctatttctccgcatcctctccagcacctgtttcctgactttttaatgattgccattctaactggtgtgagatgatatctcatagtggttttgatttgcatttctctgatggccagtgatgatgagcatttcttcatgtgttttttggctgcataaatgtcttcttttgagaagtgtctgttcatgtccttcgcccactttttgatggggttgtttgtttttttcttgtaaatttgtttgagttcattgtagattctggatattagccctttgtcagatgagtaggttgcgaaaattttctcccatgttgtaggttgcctgttcactctgatggtagtttcttttgctgtgcagaagctctttagtttaattagatcccatttgtcaattttgtcttttgttgccattgcttttggtgttttggacatgaagtccttgcccacgcctatgtcctgaatggtaatgcctaggttttcttctagggtttttatggttttaggtttaacgtttaaatctttaatccatcttgaattgatttttgtataaggtgtaaggaaggcatccagtttgagctttctacatatggctagccagttttcccagcaccatttattaaatagggaatcctttccccattgcttgtttttctcaggtttgtcgaagatcagatagttgtagatatgcggcattatttctgagggctctgttctgttccattgatctatatctctgttttggtaccagtaccatgctgttttggttactgtagccttgtagtatagtttgaagtcaggtagtgtgatgcctccagctttgttcttttggcttaggattgacttggcaatgcgggctcttttttggttccatatgaactttaaagtagttttttccaattctgtgaagaaagtcattggtagcttgatggggatggcattgaatctgtaaattaccttgggcagtatggccattttcacgatattgattcttcctacccatgagcatggaatgttcttccatttgtttgtatcctcttttatttccttgagcagtggtttgtagttctccttgaagaggtccttcacatcccttgtaagttggattcctaggtattttattctctttgaagcaattgtgaatgggagttcacccatgatttggctctctgtttgtctgttgttggtgtataagaatgcttgtgatttttgtacattgattttgtatcctgagactttgctgaagttgcttatcagcttaaggagattttgggctgagacgatggggttttctagataaacaatcatgtcgtctgcaaacagggacaatttgacttcctcttttcctaattgaataccctttatttccttctcctgcctgattgccctggccagaacttccaacactatgttgaataggagtggtgagagagggcatccctgtcttgtgccagttttcaaagggaatgcttccagtttttgcccattcagtatgatattggctgtgggtttgtcatagatagctcttattattttgaaatacgtcccatcaatacctaatttattgagagtttttagcatgaagggttgttgaattttgtcaaaggctttttctgcatctattgagataatcatgtggtttttgtctttggctctgtttatatgctggattacatttattgatttgcgtatattgaaccagccttgcatcccagggatgaagcccacttgatcatggtggacaagctttttgatgtgctgctgaattcggtttgccagtattttattgaggatttttgcatcaatgttcatcaaggatattggtctaaaattctcttttttggttgtgtctctgcccggctttggtatcagaatgatgctggcctcataaaatgagttagggaggattccctctttttctattgattggaatagtttcagaaggaatggtaccagttcctccttgtacctctggtagaattcggctgtgaatccatctggtcctggactctttttggttggtaaactattgattattgccacaatttcagagcctgttattggtctattcagagattcaacttcttcctggtttagtcttgggagagtgtatgtgtcgaggaatgtatccatttcttctagattttctagtttatttgcgtagaggtgtttgtagtattctctgatggtagtttgtatttctgtgggatcggtggtgatatcccctttatcattttttattgtgtctatttgattcttctctctttttttctttattagtcttgctagcggtctatcaattttgttgatcctttcaaaaaaccagctcctggattcattgattttttgaagggttttttgtgtctctatttccttcagttctgctctgattttagttatttcttgccttctgctagcttttgaatgtgtttgctcttgcttttctagttcttttaattgtgatgttagggtgtcaattttggatctttcctgctttctcttgtaggcatttagtgctataaatttccctctacacactgctttgaatgcgtcccagagattctggtatgtggtgtctttgttctcgttggtttcaaagaacatctttatttctgccttcatttcgttatgtacccagtagtcattcaggagcaggttgttcagtttccatgtagttgagcggctttgagtgagattcttaatcctgagttctagtttgattgcactgtggtctgagagatagtttgttataatttctgttcttttacatttgctgaggagagctttacttccaactatgtggtcaattttggaataggtgtggtgtggtgctgaaaaaaatgtatattctgttgatttggggtggagagttctgtagatgtctattaggtctgcttggtgcagagctgagttcaattcctgggtatccttgttgactttctgtctcgttgatctgtctaatgttgacagtggggtgttaaagtctcccattattaatgtgtgggagtctaagtctctttgtaggtcactgaggacttgctttatgaatctgggtgctcctgtattgggtgcataaatatttaggatagttagctcctcttgttgaattgatccctttaccattatgtaatggccttctttgtctcttttgatctttgttggtttaaagtctgttttatcagagactaggattgcaacccctgcctttttttgttttccattggcttggtagatcttcctccatccttttattttgagcctatgtgtgtctctgcacgtgagatgggtttcctgaatacaggacactgatgggtcttgactctttatccaacttgccagtctgtgtcttttaattgcagaatttagtccgtttatatttaaagttaatattgttatgtgtgaatttgatcctgtcattatgatgttagctggtgattttgctcattagttgatgcagtttcttcctagtctcgatggtctttacattttggcatgattttgcagcggctggtaccggttgttcctttccatgtttagcgcttccttcaggagctcttttagggcaggcctggtggtgacaaaatctctcagcatttgcttgtctataaagtattttatttctccttcacttatgaagcttagtttggctggatatgaaattctgggttgaaaattcttttctttaagaatgttgaatattggcccccactctcttctggcttgtagggtttctgccgagagatccgctgttagtctgatgggctttcctttgagggtaacccgacctttctctctggctgcccttaacattttttccttcatttcaactttggtgaatctgacaattatgtgtcttggagttgctcttctcgaggagtatctttgtggcgttctctgtatttcctgaatctgaacgttggcctgccttgctagattggggaagttctcctggataatatcctgcagagtgttttccaacttggttccattctccacatcactttcaggtacaccaatcagacgtagatttggtcttttcacatagtcccatatttcttggaggctttgctcatttctttttattcttttttctctaaacttcccttctcgcttcatttcattcatttcatcttccattgctgataccctttcttccagttgatcgcatcggctcctgaggcttctgcattcttcacgtagttctcgagccttggttttcagctccatcagctcctttaagcacttctctgtattggttattctagttatacattcttctaaatttttttcaaagttttcaacttctttgcctttggtttgaatgtcctcccgtagctcagagtaatttgatcgtctgaagccttcttctctcagctcgtcaaaatcattctccatccagctttgttctgttgctggtgaggaactgcgttcctttggaggaggagaggcgctctgcgttttagagtttccagtttttctgttctgttttttccccatctttgtggttttatctacttttggtctttgatgatggtgatgtacagatgggttttcggtgtagatgtcctttctggttgttagttttccttctaacagacaggactctcagctgcaggtctgttggaataccctgccgtgtgaggtgtcagtgtgcccctgctggggggtgcctcccagttaggctgctcgggggtcaggggtcagggacccacttgaggaggcagtctgcccgttctcagatctccagctgcgtgctgggagaaccactgctctcttcaaagctgtcagacagggacacttaagtctgcagaggttactgctgtctttttgtttgtctgtgccctgcccccagaggtggagcctacagaggcaggcaggcctccttgagctgtggtgggctccacccagttcgagcttcccggctgctttgtttacctaagcaagcctgggcaatggcgggcgcccctcccccagcctcgttgccgccttgcagtttgatctcagactgctgtgctagcaatcagcgagattccgtgggcgtaggaccctctgagccaggtgtgggatatagtctcgtggtgcgccgtttcttaagccggtctgaaaagcgcaatattcgggtgggagtgacccgattttccaggtgcgtccgtcacccctttctttgactcggaaagggaactccctgaccccttgcgcttcccaggtgaggcaatgcctcgccctgcttcggctcgcacacggtgcgcacacacactggcctgcgcccactgtctggcactccctagtgagatgaacccggtacctcagatggaaatgcagaaatcacccgtcttctgcgtcgctcacgctgggagctgtagaccggagctgttcctattcggccatcttggctcctcctcggtggtattattgttccgtttagtacttgtttacattctagctctctccctgctcacgacacctccttatgacaatcaaaactggttctctgcttaataaagagagcttgcggggaaggatctgggaattcagtggcatactgaatttagtacttcttttcaaatcttatttgtccttgctttttgttgttcacaataaaaatgagtgaaatcaccatacatctcatctcccttttaaaataagatatactttccttttctctctctctctctttttttttgagacagagtctggctctgccacccaggctggagtacaatggcacaatcttggctcactgcaacttcctgggttcaagcaattctccctcctcagcctcctgagtagctgggattacaggcacctgccatcatgcccagctagtttttgtatttttgtagagatgaggtttcaccatgttggccaggttgatctcaaactcctgacctcaggtgatccaccggcctcggcctcccaaaatgctgggattacaggcatgagccactgtgccggctaataagatgtacttttctaatactgacctaaaggcaaactggttcccttgggctagtgcaaaacatgattgctttctgccacttattgactttaacaaaacaaagtcacatgtaattactgtttaagggagaaaaatactaaaactaacatacggtgcaaagaagacaagaaatactgctaaaaaagtactttcaaacatgaaagaaaagctgttatatacactcagcttagcctggctccaagctgagctgccaggggagctccaaggctgggctttacctcaaggattttcagagccaggcaagctgctttctggagctggaggtttgtctttgttagtgcttcacagtaatagagcaaggcctgaaagagaaggagggacctcatgaaggcattttggtttgttcgtagtttaagaggtatacctcattcttactctctgagataaactatagcatataacctacacattttgcactaccttcagagcaagaaaaaaaaagccattgaaattcatattaattaaaagagtcgtttattcaataaattgatcccttatgttctcctagatctactatgactctaggagaacataagggatcaatttattgagtaacataatgaccgtgggcttttattggccacctaaaggtaattttttaaaccaagtaacgaggaaggcaaaatttctcagagctgtttttgatcccagatcattaactttttcttttaaggtgttaatccctttctttatgtcccatcataaaggcctgcaagctcctgccccttgtctcatgtgtcattccaagatttgaaatattctcctagagtccatgactctaggagaatataagggatcaatttattaaataaaattgggagagagttatgattctggcttttaaggagcccttagatgtagtagaaatgctaagactgtttagaaggaactgaagagaagaaatgtattaggtcccataagaaatctacaaggtaagtcagtcacttggagaagagacatcttacggagtgccagggtaagtttcacaaaaatgtttgaactggaatggaaatgatggcttagatttcagtagggaagttgattgaaaaaaaggtattcagtcagaaataaggaagacaggaggaggcagtacattccagtgaggagggtggtaatgtcagtttgagatttgctgagtttgatacatggcaaatgaatgctctgtttaaaaaatctctgcataaaagtacattatcttttttttttttgagacagaatctcgctctgtggcccaggctggagtgcagtggtgtgatctcggctcactgtaacctccatctcccgggttcaagagattctcctacctcgattacaggtgcccaccaccacgcccagctaattttttttttttttttttttagtggagacaggattttaccatattggccaggctggtcttgaattcctgaccttgtgatccgcccacctcggcctcccaaagtgttgggattacaggcgtgagctactgcacccggccaattgtcttatttttaccaagctaatttcttcctaaatggttgataaaatgtgtagtacttaacattaattcaaatgaataagaatcactatatgtcatattggttcataggaaacttaattactcttgaagagaattgagggtggaaagagaggactaacttttgattttgttgggctatattgtgcatttcttgctatttgtctgaattacttttattttctatttttatttatttatttatttttggagatggagtttcactcttattgcccaggctggagtgcaatggcacaaacttggctcactgcaacctccgcctcccgggttcaagcgattctcctgcctcagcctccctagtagctgggattacaggcggatgctatgatgcccagctaatttttgtatttttagtagagacagggtttcaccacgttggccaggctgatctcaaactcctgaccttgtgatccgtccgcctcggcctcccagagtgctgggattacaggcgtgagccactgcacacggcccctgttttctcagttttataggacaattccatttaaaaaaattgaaaatataatttatataccataatatttagactacagcatgtataattcaatggtttttagtatattcacaaatcatccccatcatctgatttcagaatattttcattaccccaaaaagaaatcctgtacccattagtagtcattcccaagaccctttctctccagtcgctggcaaccactaatctactctccattactatggatttgcctactttggacatttcatataaatgaattcacacaatatgtagcctcctatgtcttgctctttcatttggcatagtatcttcaaggctcatctaggttgaaggatgtattaggattgcatttctttttatggccaaaaaatattccattatatggctagaccacattttatttattcaccagttgatgaaccttcagattgtttctactttttggttattatgaataatgctgctatgaacatctgtgtacaaggtttttttgtgtggacatatggtttaacactctttttttttttttttttttttttgagagagtctctcttggtaacccaggctggagtacagtggcaccatctcagctcactgcaaactccgcctcctgggttcaagccatacgcccaccttagcctcctgagtagctgggattataggtgcctgccaccacacccggctaatttttgtatttttagtacggatggggtttcactatgttggccaggctggtcttgaactcctgacctcagatgatctgccctcctcagcctcccaaagttctgggattacaggcgtgagccaccgcgcccagccagtttaacactgtttttttttttttttgagatggagtgttgctcttgttgcccaggctggagtgcaatggtgcaatctcggctcactgcaacctctgcctcccgggttcaagcgattctcctgcctcagcctcccaagtagctgggattacaggcatgctccaccatgcccagctaattttttgtatttttagtagagatggggtttctccatgttggtcaggctggtctcaaactcccgacctcaggtgatgcgcccgcctcggcctcccaaagtgctgggattacaggcgtgagccacagtgcccagctctgtggcttaacactcttaaagttttaacactcttaaaggaaacaaagatatgcagtataggttattacagcaagaacaaaagcagtaacagtaactagctctttactagacctaaatagttagagcctgggctttggcttttgaaaacctctctctggcttgccttttggcctctactcacttgagggtgagcagccaaaaggggaggaaataagcctcaatccacaagtgggcagctacacagggactagcctccagtacaaaaggaacaaggtgactgtccctgaagtgccacttgccatcaaccccctccaaagctaccatttccagaggtggatatacaccaaggtcatctttagcatttcatccctattgaagcattgttataatgcaaacatgcccgagaggaaggacaatttaagttgtgatcacccatttaagtcttggaatatgtggttttggtaaggggtaaacctatggtttgatagttagccttcaagtcccttgatatgagtaaaagagggaaatggcaggagttcaaggctgtagtgagctatgattgcaccacctgggtggtgcatgtccagcttgtgtaacaaagtaggatcccgccattaaaatccaaaacaaacctgagagacagagaaatgggcaggggaaaatagagaggagtcttgtgctgaagttcatctactttataattttaacaagggctggccctggaggtcagaaaccaatcgatggtgtctgtgcaaaatgctgagtcataattcatttagtttgattatgttggtggaaatatttgtctccctcatttcaggaacacaaatattgtaaccatgtgtgtaaatatatctgaaaatatcaattcacttgtcccatgaagagatgactaggtacttgttaggtgccaagctaacatgctaggtgatagggcaaacctgtctatgttaacttcagagatgatagctgaccctgttaattttggggttactgaataggttgctcactttacgtatttatttatttttatttatttatttattttttgagacagagttcttgctcttgtcacccaggctggagtgcaatggtgcgatctcaggtcactgcaaccttcgcctcctgagttcaagcaattctcctgcctcagcctcccgagtagctgggactacaggtgcccaccaccacgcccagctaattttttgtatttttagtagagatggagtttcactatattggccaggctggtctcgaagtcctggcctcaggtgatccacccgcctcggcttcccaaagtgttgggattacaggcgtgagccactgcgcccggcctatttatttattgttaaatgcctgttgagtcataaggttgctcactttagtttgagtggttgcctaagaattggtggctgcttagattcataacaattccaggaagcaaacagaaggcacattataaagccagaagcccctgtcaccatgcagaggccaccagcatctcctctgaccagtcctggataattaaagaagcaaccacatctgaatgcaacagtatagttggaggacagtggatatttcctacttgtctaggtgtggggaaaagcataaaataatgaaccaacacacacaacttttattttgtctcaatagctatgatccttgaagcaaggttccgggtttacagtgacaccagctctcacagaggcatttttgtgttgctttagtgctttgcatctagttttaagaacttaatgtaataacttttgctattccatataagaaaatatggaaagggttcaggctttgggagtcaaacatttctaggtagtaatccaaattctgttacttaactagtcttagtcaagtttaactccttggaggctcagtttcctaatccataaagtgggatcatagcatcgaccttgttagagataagacagctaagtgatgctgcacggtgcctggtgtttaggaagtacacagtacttgacaggtattatttcttgtttttctgactactggaaactcttcaagggtaaggactgcttttcctttatttctacagtgtccacaaaaccctccatataataccagggacacagtagtcacataatgaaggtttagtcatgaaatatgaatttgagggaataaacatgagagctgaattggaataacaagagaatatttcacctgtggctaatgccctaaaagtaaaagatgcatatagaatagccaaaggaaggctatgtcttacctgttgttatttcttttttatttttttattttctgagatggagtctcgctctgtcacccagctggagtccagtggcgcaatctcggctcactgcagcctccacctcctgggttcaagtcattctcctgcctcagcctcctgagtagctgggattacaagcatgtgccactaggcctggctaatttttgtatttttagtagagacagggtttccccatgttggccaggctggtctcaaactcctgacctcaggtgatccacccacctcggcctcccaaagtgttgggattacaggtgtgagccaccgcgcctgggcccctgttgctatttctaagggcacatttcgaacactggcccctcagtgtgactaaagagtatcacagacctgctccccataaactgcacactcagatgcgtatatatcctgctaccagcatgttcacgattctttaattttccttctctctttttggtaggaggtgagagtggtcagcccacagaacagctttttgagctaattccactgaaagatcataactgtgtagcaaagaactacatagagttcacccttttggaccaaaatggcgttagagtggattattttcttgtgagtacacaaacgttccattacatattagcttaggcagtgccttagacaagttaaacaaacggagttcaacatgggaccttttcaaggacaaggagaggccatgtttaactttcttgagctgatctggattttgatgagagttagtttttagaatgacagtataaattgtaaagggctcccaggggaccaattcctcttgtatgagccaatgtacttaaactacagattcctgttccatctggatggctattgaattaaagctgagggagagataaattacctcttccctggaagtaagagtgatggcttttaaaattaaaaatattccagctctttcagccaatagttagattacttgaccccaaactgctcataagacatgcctgtgtgcacacacatatacacacacatatgttcaccataatatttttagagttggacactatacaaatgcccaccaatacacagtaagaaaataaattctaggatattcatacatggacatgccattcatccataaatataatgaagtagatcaatatgttctatcgaggaaagaaaataaccatgatatattacatttaaaaatccattatgaaataggatagtgtgatctcattttaaaaattatgtatgttagcatatatatagatacaatctgaaagaagaggcagtatgttattaatagttttctctgggggctggacttaaggggtacttatctatatttctttagttttgattgctttatggagcacacattattaatacgcagaaaaattatttttataaaggaataaatgctaaaatattagtagtaaatgataggaaattaaaccagcttctggcttgatggccatggtttagtgtcttaccttttccctgaaatgctgatttttggaggctgctgccaagtaaagcgtcacagcctcactaacttcgttgtcctctctggttaatagcagagccagagtcctgagtacttcctgctgggccaggaggttgctgggagcaaggtcactcatggtttgtagcagtttttcatctcttagtgattgcagagtctgaaccatggaaactggagggtaagaaggaaggagatttcatgttctgacatgctaaagtaatcagctcattacaaatataaatagaactcaagtacataagaaagtatagtatagtaactccaatacatatgaaaaattagcatctgataaagatggtatttcagattggtgagaaaaggacagactatgcaaataactacattatagtgatgggcaaaacacatgggaaaaagtgaaggtgggtttctatctcataatggctacaaaaataacttacaggtgaattagcccaaggtaaaaatatacagaagaaaatacaattagacattttttacaatcttcctaatatatgtatggcagacttaattgctcctcttttagtcaaacctgtctggcaaaaccccaatcctgggtgaacccagtgcaaaaaccaagtctgcactgaggcaactgggccccgatggagcaacctatctatctatttatttatttatttaatgtttttctctttttttttttttttttgagacagagtctctttcttgttgtccaggctggagtgcaaatggtgtgatctcggttcactgcaacctccacctcctaggttcaagtgattctcctgcctcagcctcccaagtagctgggattataggcgcatgccaccacgcctggctaattgttgtatttttagtagagatggggtttcaccatgttggccaggctggtctcaaactcccgacctcaagtgatccacccgccttggactcccaaagtgctaggattacaggtgtaagccaccttgcctggccagagcaacccattttgttggttggaataggaagacaatattaaaaaataaggttttgagtcccatttggacaaattaaccatgttccatgaataaagagtatactctactccctaaccagaaatccagcatgatcaaccattagtcacaaaaacactgggatgagaatatgtctggtcagtacaaatggaaaaataaaagccaaaattcatgctccatgaataaagcaacattctctacacagtagacaaatttgtgatttatttagattttttttttttgcttaatttcctattttccttgctgtgaatgctctatcaatttcactgctttgtaaataaacaccctagtaaaaagcctgaaaggaagcattatggattataacatctaaattaacaaatcacagaaaatagcctaaatgcccaacaatataatcaaatacattagtatacattcaaatgcggaactattaatctcataactaatataatctaatacaaatgctttcaaagaataagatagaacataatatcaaataaaaaacaggatcaatactctataaggcataattacaatttggaatgtaaaacccatgtacattcaactgaaaaatgcattcaatttaaaaagtaagaggagagattggaatttctttctttatacttctctgtttacatttttttttttaataatgaaggcttttcccttttataatgaaagaaaaaagacacttaaaatgttaaaggtttttttcattgtcattccccattgttgttagtaaatgagtaggccttcttggggaccgtgtaataagagcctagagatgtaaactgccactgatgcaaactgagtaatataaacattttctcagaaaatggatttagattgggacaaatttagtatcaataaatgaagactataatattataaaataagactttgtggtcctaaaacaaggtctttctgcccatgctttctcttcctggtcctctgtgctggtgtctgccttgtaaggggttatgcacagactctctcccatgctccgtgctggtacagtgctgggtgaaggaagatttttcttccttcactatgatgccacccaatgtgctgactgtgttgttgcaggatttgatgttctggagagagaaggggtaagcctgggcttgcgccagacatgttgctgctgcctggtgccgtgccagactcacctagctccaaagaacacacctcattcctcttgtcccttttaacctgcattggtcaaggctctgtggatttataaagcacaaacctgggaaccagaaaccagcccctcactacctggctccactcccaaagtggagttttcacttgatttagattgctattttatttccagtctctgaagggccgtgtggaatggcaagaaccagcttcattgctgcatgcctgcactggcagctgttcttgtaccctggacatggagccctggagttagttttccaccttttcctcctttcccttcccaccatgttacctacctgccttctttgaaaccccatttcttcctattattaatgaaagcctcaccaaaaagggcaatataaaatagtattgcctgtaggattgatccgactaatggcaaatacattactgaaggaaataaattacagtgaaagcttaaatcatttaccagcttcctgtaaatggtacctctctgccagatgattgagttgctcctagtgaatccctggttcattaacaaggggctcactaatgttaaaagtccaaaagtcacttaaaaggcaaattgcacctctactgtggacttgaaaaataaaaggccatcattgccaaaagccatgatttaaaagagcagagataacgccaaattgagccaccactacaatgtgacaaaagaacatgtcccaccttgcctggccagctggctcaggtaactctccaggtcactgacgccgtggctggtgaagtaactgtaatactggaaaacagtgacgacttccgaggacaggctggaggaaagcagaggctcagcccggtccagaatttgggacaccagggttcgaaacactattcggaagggaaagacacaaagcagctttagatagatgaccattcattcattcattcattcaataatttttatttttatttttattttagagacagggtctcactttgttgcccaggttggtctcaaactcctgggctcaagcagtcctcctgcctcagtttcccaagtagatggaattgcaggcatgagccatcacacctggctcaataagttgtttatcttttattgtggttgaagatagagtgaagtagtaaagtaagcagctggatggttttgcacatgtgcacacctgtgtaactgccatttagatcaagatatggaagacggcctgcattccataaggttttcttgtgccccttcccagtctatagctacccttcccttcccttatatataaaatatataatgaataaatattatatatgtgtgtgtaggagagagataaaaaggaggaggaagagacaagtgagagaggaaaagagaaggaaggaaggaaagaaggaaggaagaatgaagggaagagaaagaaagggaagggcacaaataggcaactaacaatctgacttctatcaacataaattagtttcacctgttcttgaacttcatgtaaatggaattatatagtatgtacttttggtgtctttttccttttacacaacaaagtatctgtgagaatcattcaaattattgattatagcaacaatgtgttctttttaaaaattgctggcccagggccagacacagtggctgacacctgtaatcccagcactttgggaggctgaggcaggtgaatcacctgaggtcaggagttcaagaccagcctggcaacatggcggaaccctgtttctactaaaaatataaaaattagctggtcatggtggcatgtgcctgtaatcacagctactgggtggggctgaggcaggaggatcgcttgaacctgggaggcgaaggttgcagtgagctgagatcgcgccattgcactccggcctgggcaacagagcgagactccatctcaaaataaataaattaattaattaaaaaaaattgctggcccagtgtagtggctcacaactgtaattccggcactttgggaggccaagggaggattgcttgagcccaggagttcaagaccagcctgggcaagagactgaaaccctgtctctactaaaagtacaaaaattggccaggcatgttggcatctatctacagtcccagtacaaaaggggaagaggcaggagaatctcctgagcccaggagattgaggctgcagtgagctgttaaaacatcactgcgttccccctggatgacagggtgagaccttgtctgtattttgtttttaaaaattgctgtgtaatactctatgctatgagtatattacaatttatccattctcttgtgggcatttaggttgtttccaatttttggctcttgtgagtaaagctggtaggaaccttcatataaatgtcctttcttgtgaacatagcactttatctgtctttacatatttaggaatgaatgtgctggatccaacggtagggggtatattgagctttagtagaaactgccaaacagtttttccaaagtgatcataccatttgacactctcgtactggtgaaattgtaatgaaagaagtatacacatagaaataacaatacataagaatgtagtagctttattattattgagatggagtctcagtctgtcagctgggctggaatgcagtggcgtgatctcagctcactgcaacctctgcctcccaggttcaagcgattctcctccctcagtctcccaagtagctgggattacaggtgtgggctaccacgcccggctaatttttgtatttttagtagagatggagttttgtcatgttggccaggctggtctcgaactcctgacctcaggtgatccacctgtctccgtctcccaaagtgctgggataactgacgtgagccactgcgcctggccaaaatgtagtagctttaaatgtcactgctgatattctgaattaaaacagttcaacactttcttttcttaaatctgagtagatgatgttttccctggacagtacacttcttttttcagggatggccttttgtgtgtttcccatctgcaggcaagtggtaggaggacccctctcccccgacccccaccccaatgcccactctcacactgaaggacagaaattctctctctactgctgcctcatacctgggtctgcaagtcctggatattctttgttgacagttctggcaaagctggcctccagctgcttcatcactctgtccgctgggctgtggtagacaccaacagggctgcagcacttggtccagaatgacagcaaagacagctttttgtgaaattctggtatggctggaaaagaagagcaaccccccatctcgtaacacattttattttattttattttatttttttgagacagagtcttgctttgttacccaggctggagtgcaatggcatgatctcagctcactggaacttccgcctcctgggttcaagtgattctcttgcctgagcttcccaagtagcagggattacaagcatgcaccaccacacctggctaatttttgtatttttagtagagatgaggtattaccatgttggtcaggctggtctcgaactcctgtcctcaagcaaaccacccacttcggcctcccaaagtgctgggattataagcgtgagccaccacgcctggccataacattttaaatgaagcagatgaagacgtgttggggaaagggtgtgtatgtggggggtctttagggactttttttctccccataagactgtggttagttttcagatggaactagcagattcctgtgtggtcagcagatggcccgaagggtaaagaagttatgacgaggaactcatcctgcttggggagcaaagaaaatagagcaaaaacaagttcgtttgctgtgagtgataggaaatacaggagctctacccttgggcagcattccaaacttgtgatttcctataactccacagcagaaatcatacaggatcaaggactcaaactggaggagagtttcctgaaggggatgggaggtagcagcaggtggctggaggaaatttttaccctgcccaggtggttccctgactgaaatgactgaacagcatggtaccaggtgggacaggaacaatgtttcacttgaatgtgtcatgatcatgaggagggggctgggagaggagaggacacaagtcactcacagcctgaatgtcctgcccctcttcatgcccctcagagaccggccaaggtcacctacttctagtgggaatggatgtgggaggcagaaatgcacagggagaagatagaggaagttttaggcttaatcagagattatctggaagaccctgtttctgctgaatatctgatatgaaaacagacataaattttggtttctacaaaagtgccccatagccagatcacacaaattcaaaggcatctttcccaggtcaaattcttcatttaaaactcttagaatcaggaactctcctggaggcgtttgcatccatgtatttgtacctttccccagcagggtctggcaggatcttccaattgacagtcactacaggagttgtcttagccacctccagggtgcaagagcatcctatagtcatctgtccctaaagggaaccgcaccagcagaaagtctgtgaaactctgcctgtgaagtggatgctgtttttgtttctgggtctgacttctgggggtggaggccctctggaaaaaactgtgtgtctgctgctttgactcagaaagccgaaatgtgacattaatgagcccaatttgtttggagacctttctcaatcctgtgacctaagaatgcttttctgtttttccaacaaagcaatgaacatgcatagggagtggactgggctagtggtgtcatcatttacgtgaatagcggtgtaactggcagatacttaccttccacaacagaactgatatttcctatgttctcatcactgacagctgcgagtttctccatcacttggatctgcctagaaagcttctctaagagacttcttgccacaaatggggttttgcttgagaaaacaatttgctggtaaaacaaacaaaactcctgtttcaattatgttgttttcagtagagctttctctacccagcctcatccttcctgaatgtggtgatgatactaaataaactcatgcgatgtttttcttccagctcgataatgatcctcattccatgccagttacaacatctgatgaaatcaggcatgtttttgttgctttgcatttcttcgtgtgtgcataaattctggaactttctcagtagtaggtctacaaggttattataaagctgctttcccttttatgtattgtgaatctgatcttcccctttgaaacgtgaggggcagtttaggctgtgtcttggtgtgtaagcagaaatagatttgtcttacaaatgcagtaatttttcacagcatggttttatttttgtgtgtgtgttcaagctgaaagttaagagcaggttaaataataatgagaattacaatcagagctgtctcttgataacaaatgagtgctcactatgtgccaggcactggtctgagttctgtataagtgttagcttatgttatttctcaaaacaacccaatgaggcgggtcttattgatatccccattttactgatgagaaaattgaggcacagagaggttaagtaacctgcccaaggtcacataagttgtaagtgggtttatttgtgtgcagttcacaagaatgagaagacctaagagaagaaaggatataagtcatttgctgcccaatggttctactcctttctgtgtctcagagacctgtctcaatcacctggtagccatagatgcagaacacagacctgtactactatgctgaattgtttaaagtattgggactctaaaacaaataggattttcaaacccagcactttgggaggctgaggcaggcagatcacgaggtcaggagattgagaccatcctggccaacatgacgaaaccccatctctactaaatatacaaaaattagccaggcgtggtggtgcaggcctgtagtctaagctactcaggaggctgaggcaggagagtcgcttgaaccctggaggcggaggctgcagtgagccaagattgtgccactgcactccatcctgggtgacagagtgagattgtctcaaaaaaaacaaaaacaaaaacaacaacaacaaaaaaacaaaacaaagtctagtgcagcaattatgtactaacacccttcctgtgagtaaatacaatagcaatgaactgctttattttgaaaataattgtagtgattatgattcttagaaaatgcacatctttatctctctgtggttatataactaataagtaagctcacacatgaatcaacgcaagccagaaggtaagtttctaaatctcattccttcaatctacatctttgtatccacctcttctgtttttgtaccattgctcatccccacagaaaggatgaattgttataatcatggccttattaccgagagaaacactgcattgactgcttgcactaaaagcatgccaattagtctttgcgagaaaacagtcactccttcaaagataagaattctcttatgtctcacaaaatagctattattctctaaaagagaaacaagtggtttgcttggcatagtatcaggctcagcaaggacaaagagctgtctcgttcaaatggttggtgagtagaaaatagtcatacataaataaaaatccctgtctgttttgatcagaaaaaaaaaaaactgcacattctaccagattggttatcagtctcatggtttgtgagacctttgtggtttttgacctcaaaactcaacagaagagttcaactaagtgttggctaaccaagtggcaggagttataattgccaaccagtctcccacagcacacagttgtctgaggcttctctgatgctcttcatctatggtggagaagcatattctcctacatctcatcacatgtctgttaccaaggaggcaacactgcccctctgctgggctcccgagggacccctagctcctcaccctgactcttgtcttccaacaggttctgtgctcttgggttaccattcctcctccttctgcacccttcctgcttggctgatccccttgacactttttcttttcttttctttttttaatgaggccttggcctcccaaagtgctgggtttgaaaatcctatttgttttagagtccaaatactttagacaattcagcatggtagtacaggtctgcgttctgcatctatgcctaccaggtgatcgagacaggtctctgagagacacagaaaggagtagaaccattgtcacccaggctggagcgcagtggtgccatcacagctcactgcaacctctgcctcctaggctcaagcaatcctcccacctccgcctcctgagtagctgggaccataggcctgtgccaccacacctgactaatttttgtatcttttgtagagatgaggtttcactctgttgaccaggctggtctcaaactcctgggctcaaacaatcttcctgctttgacctcccaaagtgctgggactatgggcctgagtcactgcgcctggtctggaaccattttattagcttctgcattctcttcctgttccacatacacccaagcaagctgggagaagaatgatattagaagaaaagcaaccaggcaaggagaaagctcttaagtagatgcttgaggaaaaatgctttgttcaagacagctgaaacccttcctgcaacaaaagaatttaagaacattttgctccactgttgaaaaaccttaagtggtaaacagcttgagatgagaaggaaaattagctctgtggtgtcccagaatgagagctaaatggtgatgatgatggcctagagaattatatcttagcattgctaataagaattacttattcaaggtccaggagactgtggttagattctttaacactttcttttagctatccaggtggtgaaaaactaattcatttgacattcatgttaatatatattcagcactactggctttcaaactccattgcagatggtggaatacaaatggcttccccccacccccttaatcacattattctcaggtactaccaaatgagtcaaaagtgagagctaaccatatgccacctactactgtgaaggtctggagagttaggttcgaagatgaaaaacccaaggttgtagagggatgggcaggcccatcagagtttttgacttggctcaaaccacagcaagactgttctcttattcctgaattctcatttccctggcaacactaaaaaatgaaagcacacttcctggtatgtaaatcacctggcatctcaaacacaaattcatcgctgatcctacctgcacgagttgggtgcagtactggaggtgcctgacgatggtgatgtccaggctctcgttgcctgtggtcagtgggagaggacttcctgccacactggtcccaactcctgtgtcttcagtgagcgcttcactgagatgccccctggcttctgggtgaaccgacctgtaactattgaaggtgggcaaaacattagctattctttttctgtgcacaaaccacaggtcaagtccacatggtttgcatcgggccccaacagcacccactgaaaacagtctttcacttgcctatcttgaaaaatagagacacctttaaaaaattacttaattcagcctggtcaccaaattgcctagtgttaaaaggacatgcaaacaaattgctttcaaagttctttctctactttttaagcctaatgaaccacttatgaagtagtttcacccagaagtctttgaaacatgccctcattttgaatgtgttgcactttcctgctctgttgacagggtgatctgccaaattttctggaattaaattgtcctctatatttgtggtttcccaaaggcaataccattaagaaataatctgccaaggttttttcctggcctcagatcaactgctacttgaataaaaggaaaaaggaaagctgccaagaagagagacatgatgttctactctggacaaaagttaaaaagggtgtttgaatattcagaggaatcgcttagttctgcctctgacgttttgtttaaacccccttgttgaactgtatgaagttatatcatggtaggcacctacatttaaaaaaatctcttgcattgattatctaattttattcataaactaaacctgcgtactagggagggtggcaatagtggtcttgtttcacatgattagcagagattttgagtgtcctggttcacacagctagacgggacagggaagatttgggcttctagcctcacactctctggtgtccacaatttaaaaagattagcaccagagcttagaggctttgaatgctttattctgattctgattcacatttgactccaaggggaaaacactcagtttgtgtctgggcagtccacacatagcagccaatacatatttaaaatacacacacacacacacacacactctctctctctctctgtctctctctcttccctaatacttctgatgacatataataagattgatcaaattagacatatttaatatcaatgatgtataacatttataaaacctgtgcttgtgatatttttttgttaaaatgtttcttatagcaagaagaaaaaaagtttagattgatgcctgactttgctacatcctgtaacagcttaaggtaacaagtatgcagaaaaatttttggataagaagtatttcacaaattctatcaagctaaaaaatattaaggcagaacaatttatttttattattttttttgagacggagtctcgcactgccacccaggttggagtgcagtggctcgatctcaactcactgcaacctccacctcccaggttcaagccattctcccacctcagcctcctgagtaactaggactacaggcgtacaccaccatgcctggctaatttttgtatttttagtagagacggggtttcaccatgttgatcaggctggtctcgaactctgacctcaagtgattcaccctccagcttcccaaagtgctgggattacaggagtgagccaccactcccggccttatttatttatttgagagaaggtctcgctctgttgcccaggctggagtgctgtggtacaatctcagctcaccttgacatcctgggttcaagcaatcctcccacctcagcctcccgcatagctgggactacaggtgtgcaccaccacacccaactaacttttgtatttttagtagagatggcattttgccatgtttcccaggctggtcttgaactactgagttcaagcagtcctctggccttggcttcccaaagtgctgggattataggcatgagccatcatgcctggccaaatgtaggataatttaaacattacattcatttaataaattttctttgccatgtccccagattgcttatggggtaaattcaagttctcatgtttttttttttcctggttttattttgaaaaaggaaacccttcagggacaacaacaaacaaaaactagcatctttcagggagatttgtgaaggttgaaatcatagcttgctgtaacttgaaaacccatttacgtcatattgtgccaaggtaaagatgagcgggcaatccacccccattttgggaaagtgtgttttctttcacagcaattgatggaggtgggtatgttccattgtgcttattttgctttatatgtagttataaatttggaccccaggctctagttctcaaaacatgatttggctgcatgaggacaccggacggtgaaggtgacaatgtttcaccttcatctgttgcttccagagaaggtcacattctccacctagagacatgcagtaccagtggcagtcattggtcatcccctcttacattctacaagaaatatgcaccatgggacttaaacttgacttggatgcgtgccttgatgaactcaatctctggcaaagactcactgggttgaaggaaacatgaagggttgggaaagggaagcacaacaaaacaaaggcagtggaagtaaagtgcaagccagggagaaccaggcccaaatttgtcatccagtaagagttcttcagaaatgtgtatacctagttaatttggaattaattacatggggtcaagttgtagacactgaaccctataagacacatgtgagggctgggcatagtggctcacacctgcaatcccagcactttgggaggctgaggcgggtggatcacctgaggtcaggagttcaagaccagcttggccaacatggtgaaaccccgtctctactaaaaaaatacaaaaattagccaggtgtggtggcgggtgcctgtagtcccagctactccggaagctgaggcaggagaatcgcttgaacctgggaggtggaggttgtggtgagctgagatcgcaccactgcactccagcctgggtgacagagcaagactacgtcttaaaaaaaaatgtgtacacatgtacttgtataaaacactctcatacaaaattttcctctctatttataaagaggaaatataaagatatttattttcccttaagcaacccaaaagaggtgaataatattgacccttttattgcacttgacaataaaaaggaactgtaagccaactggtcactcatgtggagagttttatcttcctggaaatgtgtaccaggtcccctctgacagtaacaaagaactactgtatcagctgtgacaggagaaatataaggagacactaacttcagacttacctgtgtttctcagtctcagtgtctgaaaatactgagtcagcacctccgccaacattacaaacctcatcaccatcctcctcctcgtcaaaatcagaggtgttcaggaaatcaaagctttctaaagcactttcaactgtgagacttaaactggaagacctgctgcggcttactgctggcttgcactgtaaaggcagaaggcaccagggagaacatcaacatatccggaaagagaaaccagacacacgatgctcaattggagatgccacacttttttttttgtttcaagtttttattttttgttagcatttaaaaaatgcatttaaaaatctttatatccaaaaaagaagtacaaccatggataaaatggcacaatatctgggactggttgcagaagaatccagagggaagtcagcaggttgaagaataggaaacaagattggccatgagttgatcactgaggaggttgagggatgggcacactgggatccattagaggatcttctctacttctgtttgaaatttttataacaaaaagttgaaaaaaaacaaaaaaaacaaaaaacaaaaccatgtcaaccacaaagccttgggaaacagaactgctatatccctctgcctagtgctcaccccaaaataaaataccacaagcagacaaattttaagtcagtgagtcaatgctgaatactgaccaatctctaattccaagtggcaatgtcttcggtgttttacaaaaggcgctagctatctaaggcatctgctctaaaggactaacaaaacaaatcccagaaacaggaagtggttcaaattcacctagcccatgttccctaggtaagaagccctgcatcttttttttttttttttttttttttttttttttgagacaaggtcttgctctgtcactcaggctggagtgcagtggtgtgatcacagctcactgcagcctcaatctcccgggcttaagcaatcctctcaccttagcctcccaggtagctgagaccacaggcatgtgccaccacaccaggctaatttttttcttttattgcagagacagggtctccctatgttgaccataccggtcttgaactcttgggctccagcaatcctgggcttcccaaagtgttgggattacaggcatgagccaccgcacctgctcacagcatataatttttcctctgaggactgaggaaagaatgaatgccttgggcatgacaagaagcagccctgcttcctctggagctctgcctcaaagggaacaagtcccaccacttccctgaccaggccctggcatcatgggagcaatcccattctctggcctggagcattctataatgctggccacatgcagaaacattacaagcaaaacaatgccagttgctatgggcacagagttggagagaagtatttccaaatattcaagaggatgctggggtgggtcgaatgggacaaattctgcaagttagaagcactaaatgtcctccatccagttaggtgacactccttgctgatttcttagcgcaaggtaggaagggccttgcagggatctgtctctgacactcaagatggcacaaaagcacatgggaaaacgtctttcggtcttttaaatcacagttgtctcattcaccctcagtgatctccgtccaagaggcagcaccatttagtttctgatcgtcaaggtgtttagcatcctaggaatgtgaaggagggagaaaagagaaagctttgtccagctgatgctttaattctggctggatacaaagccatttgccccagacctaaacacactcactagtgatgttttcagcagtctcagggggagacagggagtcggtcttgacttcacctacttctagggtcttttttcctaagcaaggtgtctgcacaattttatcttgtacagtacagatgtgtttaaatattggtcatgacaaagaaaggggcagttgaggattttagtagcaggacaattttggaacaacagcagactgaaataatactctggaaagaagtctctgatcaccagtttttaataatgcttagtgtttcctgtggattgagctacttaccatcaccctagatgcctggaatgggagctgctatcactactggatttctctaaggaattcactttagatggcatcaatttgtgtcttagctctttgaaatgaataccttttgcccacaaagcaaagctggtcaactttgcagaaaagataggtgtttagtagaataccagacaagcagcctgcatatacaagccctgagctgatggttttgaactgatattttacagaaagtagattcagagtgcccttctgtttctcggaggctatgccatcaactgaactatctgtcatgagcatttgaggacctggagagtcaggacctgaattatcatctgcctggggcacaaatctcctacagagttaggtcagcaagactgagtagagaaggataagatggtcaaaaagccttggaaatgtagtttcagatgccactgggcaggctacatataaaaacaatcaccatattttttttttttttttttgagacagggtctcactttttcacccaggctggagtgcagtgacgtgatctcggctcactacaacctctgcctccttggctcaagcgattcttccacctcagcctccctagtagttgggactacaggtgtgtgccaccatgcccagctaatttttgtattttttgtagagatgggatttcatcatgttgcccggtctggtctctaactcctgggctcaagtcatctgcccgccttggccttccaacatgctgggattacaggtgtgagccaccatgcccagccaggaaaacagtcttagaaagggatgcaacagctttctgtgggttggttctcggcttgcccctgcaaccttactttcaagcctttttacagaccaggtccccaaagaactgctcttttaagaaaaaggatctgagttctcttttcttttatatgacaatataaatcagagcagcaaagaatacaagaagtagcagtgagatttgggacaacaattcaaatctgtcttcttgtgcagtgttttttaaaaaattaatctgtatgcaggtggagacagatacattctgatgcagcaataatgatctcattatcaggacctcccgcctgcgaggaaatcatccttctcatcttaccctcccacctccatcctgggctgtctgatccctatggattgagggtatccctggagagtctgtagatctcccgctctagagtagaatggatgattattttgctgatgattaatctgagattctgacttggttatttggaccaattgtgagagcaggtagtctcctccagcaggcagtggctcatggctctcacaatgggacggataactctgactccaaccaggcaaagggctccctgctttcccgaccccctgagagggatcctatccagtaacgcctgtgagactgtaatcatcaaagtgcctctacttcacatatgggattaaaatgattaacttggggactgggggaatttcaacattctctagagctctttgtttaaatcctaatcaatttagataagttgatctgttgtttggaaaataaaacttaatatgcactactggcatattagtgccatttaaaatgatgatgagctattaatcctgtgattggacaggattttttttttaaatgatacctcatcttaaatagaatgttggcttaggacacctctctccaaacctaatccaatttctctgaaaaggtacttacttttagaatatcatccaaattcatgacttcttggttcagatcctgaaactctttatactgctctttatgtggttctaatgcaagtaaaagcccattaaaagcatcctctaagcttccatctagaaaggatctgcagccttcagattctccaccaacagaaccctcagagagcagcctgtctgtggccattggcacctctgcagatgtgagcctcttgaccagctgctttgtgatgtttccttccgaagtgtccagttccacaggcttgagctcagaggcctcctcagactcttgcagaagtgcttctgcaacatcattctcaaggaacaggtgctcagccccagcacctgaggactgtcggcggcaagcctcagatggggccgaggcaggttttctgggctcctctgggtcttcctccttcaggtgtgactttggctcttggccttctcccagggagttcctggaagatgctgagctggtgtcatccataccctcattctgggaggccaagctgctgaggttaaactccgcaggggtgatggtaatttctggatttgttgagttggaaggggagcctgttgagtgggaggtgagggcgcagtccccgttgggcaggtcactgaagctgagcgacagtggcattttctcctcggctgcctttccattttcaaagatgtcatcaggtagatttgactatagataaaagatacctcattattattttcaatacaaatgatgcatttggcttggcatggtttatttccagacagaatataaggcaattacaatgaaaaaacccagaactttcagaatgttagcattttatttgttgatgccgtgtgtgtgtgtgtgtgtgtgtgtgtgtgtgtgtgtgtgtgtgtgtatctggcaaaagaaaacagaccatcaaggactgtttctattgttgaatctaggtgaaagttcatggcaatagtttcaaggtttgacatttttcaaaagaaaaggttgcatggggggagggggcttgttttctgaattccaagagctcataatatttggcagccatagttatgaataacattaccaatttctttttctatttaggcatctatcttaaaaaactttccaacatccatgcaatttagttccaaagttgtgatgttttgttctgcttcaattctcaaaaattatttttttgaaaatctctgcccacaaatcccaagctctggaaaatgttttattaatttagtaaccacaccataaataattcaaggccagccatacatttgcatagcttctctagaaataaaaggaaaagactaataaatggaacatcaatcttgcaggaggcaaaccccagggctctcaggctgcctagaaacaccaagtcatctgtcaagcagacctgggtggtgtcacaggtacgccctgtgcttcatgaagcagaactctgaagagagaggccagaaatatccaggtaaccaagatcattcatttattcaggcatttctattttgaagtcagctctcttgtgctgtggtctgtgtataatgcctaaatgccaaatgctgctctgtggaaagggcttttgagttactgagattaaccccttcaaaatggttaatttttcttttttttttttttgagacagagtttcccttttgttgcccaggctggagggcaatggtgcgatctcagctcactgcaacctcggcctcctgagttcaagtgattctcctgcctcagcctcccaagtagctaggattacaggcatgcgccaccacgcccccagctaatttttgtattttctttgtagtgagacaggatttcgccatgttggtcagggtggtctcaaactcctgacctcaggtgatccgcctgcctcagcctcccaaagtgctgggattacaggcgtgagccaccgcgcctggcccaaaatggttaatttttcttagatcccagattcagtttttaaagtaaataaatggtaagtatcatgctaataattgttttaattatatagaaactgacaaattctcaaaatttgctgggaataagcccggcaaataaaaacattacagcaaatgcagtgaagagcagaagggaagacaaaggctccccttcctcctccagctgggtccctggtcccattgctgctgtatctgaggccactagatcccgacacatgcagttcgttgcacccaaactgtccgttgtagcatggttggaaggtgacttactttaaccacaggacgagtgaaatgatgtgtcactggacacttgagtaacctctacaagctctgtctctttacctcccaaactgaggatgttttactctattagtgattattgaactgtggtccacaatgttgttggtgtggtgggctctggtgctcctcttcctcccctccaagcttgtgtatttcagtttcttccctcccgtatttgcaccccccacctcatatacaccttatgtctctaggaaagataaaaggaatcttttaggggagggatgaaggatgcctggagccttctccctagacctcatccatgggggttccttaggcttctagaacccatgggccctccatgtggttccactcagctttgtctgatctgtgcacacatctcatggcagcacagagggaggtgggagacactgggtatggcagggagattgggtagtcaggattcttattcaaattccaaagtccttcccagccatttgtcttgagactccaagactcaagctcaatttccacctacttaagtggcaaatattgagtgagaataaattgagatgccctgcccaaggggacttgcagtctaccaaggggacaagtctaacaacaagcacacaacagtacaatggtgtacacgctataactgagggatgacatcatgagggaagggccccaatgagggagtggctgctgcctgtgaaagagccaatcctggagctcagtgtggaagatggtgaagtagggggcaggcaccggaggaagtgcgttctagaaggaacaacatgcaaagacatgagctcctgaaaggaggtggtgcatttggaggacactgagaagctccaaggggccccagcagaggatagagagtgaaaacgtgggatgggcttgtggtgggctgtggccagatgggaacagccgctctgaggacctttgcatttatctaaaaggttttatcaggaaagccatccagttgttttctaaccttgttcttatttaaattatgacgtgaaacctctaccaactctcgcccacaacccccaacctgtagcacatgaacatatgagcatgaatatacatgttatgttaacggttgcgtgtatagctgtgttagctctttgtgttttggttcatgttttcatgtgtatttcccccatacaatcttcccattttccctgaaaactccaccagagtttagcctggtccttttcacctgcctttttttttttttttttttttttgagacaaggtcttgctctgttgtccagactggactgcagtggtgcaatcataactcactgcagcctcaacctcctgggcttcagtgatctcctgcttcagtctcctgggtagttgggaccacaagtgtgtaccaccacaacagggtaatttttaaattttttgtagagacggggtctcactttgttgcccaggctggtcttgaactcctgggctcaagcaatccacctgccttggcctcacaaggtgctgggattataggtgtgagctaccatgttcagccttcacctgcattttttaattcaatgaaaacgatgcaattattattattatgaacccaaagacttttaatcctttcctctgttgacactcaaagcttcgttttatacatctgtgaagagcaggatgttccatgtatgtgtgtgtgcatgcatgtgtgtgtgtatcctctggtgacataatgtataatatataatacttattgtattcctgactgtgaattaaggatatctttttatcgaagtgttatagaattaacaaacattataataaactaagactgagaacctttcaaatagaagtagctctagtaaaattcattgaaatccttttgagttccttgaatgccaattttttgtttgtttgtttttgagatggagtttgctgctgcccaggctggagtgcaatggcaccatcttggctaactgcaacctctgcctcctgggttcaagtgatcctctcacctcagcctcccaagtagctgggactacatgcacatgcctccattcctggctaatttttgtattttttagtagaggcagggtttgaccatgttggccaggctggtcttgaatgcctgagctcaagcgatccacccacctcagcctcccaaagtgctgggattacaggcgtgagccaccatgctgggccgaatgccagtttttgaaaggcttaaacttgtttaaaatcttgttaccatggatatctttgccacaatggagaaaaatcacagcacaaaaacagggatcattagaagagaaggacaaactgcgtctctatcaaagttacatgcacgaccaagtgtcccgccccaaggacagtacagctgtaaccatacccagtgagcaagacagagaagataaaacaagagacatgctaagtcacacatgccacaagccccagaagtcaagcactccatacccgggcaggccacactcacatagagctctagcacggccttgggactcggcctgagggagggcaggtcactgaaggagcggctgcggtgcagcttggcaaagaaagtgtcttgcaaggcactcaagacagacagccgcctgggcttgtctggggaaggatgcagccacctcttcagaagtgaaagcaagatgggggagttagtgggaagaatcaggttactacattttgttagctttttagcaagcatttttgattaaaacaaggaggctattatttatatgcacttctttaaaaggctgatcttagagaatgttcagaaaaatctacatgttaccatcacagcaataggtaaggtgggcaaggagagaggaaaaacagaggaggctcaccacctctgatagaattactaactcccagcactgtctcttaagcatttcaaatgctgggtgcaagcactggctcaggtgcattgattctactcgggaaattacactgaacttacaaagaaggagtggtctttgaaggtgggcgtttccggggtaccctggctgtacatggacattctcctctgaagggctgctgccttgttcccagcgcctgaggatgcggtcatgtcctccacgtcaaatggactgcaaaacaacaggtccccaggtatgcacatttggcaaaatcacctatcatcaacagaccacaggctaagagagtacctcattatataaaggtaaactcaaccagaggttcagaactgggctggttttagctaaactgctttgcagaaaataaacctggataaaagaaaagtggagcagaaaactgagtctagactcacccaagggaccccagaatattatcacagctctaagcacaatttagctatacacttagatacacccgttcctcattaacattagaaacacaaatttatgaatgcttgcttcgacaaaacaagatgttgaaaagtctataaaaattatctgaactttgcggggctagataccttaatggtataagacatcgacagactattgttccattctaaagaaaacactcaaaaatagaatcccattcatttcagttgacacagagcctcttgtgtgggaagagaataacagtctgttcacaatgatgccacttaacatcatggcacccgattcatccagcaagaagaatgatcttgcatgtgagacatcaatgactgcagattgtggggagggaagggctgagcaaagcatgctgatgatgacaaagcaagagtgtctttgctgcttctacacctggctttccatattgtaaatgagaccctgagcatgaatactcaacatgtcatatttacttggcaatataccgggggcattacattaaatgttgtgaactactagtggtttttgtttttttggagatggagttttgctcttgttgcccaggctggagtgcaatggcacgatctcagctcactgcaacctctgcctcccggattcaagtgattctcttgccttagcctcccgagtagctggcattacaggtgcctgccacaatgcccagctaatttttgtatttttagtaaagatggggtttcaccatgttggccaggctggtctcaaactcctgacctcagctgatccacctgccttggcctcccaaagtgctgggattacaggtgtgagccaccgcacctggagctgctagtgttaataacttatcatgacctttctcaccgggtgaatttggaaaacgatttctaagttcattgctttgaaaaaagatatctcttgccctttggggatattctatttcagtaaatacagtgcagaggaactaaggatactcataattttccagagcagtgtgaagttatgcgataaagaggaataagcatccgtgagaatcaggatttttctgaggtcaaagtaccgcctattggacagatattttctttcaaattagtttacttgagaggacatatgcccttatatatttaaaggtagagagggaaggaaggtgacagaaaaaatattttaaaataggaagtagaagaggagattggtgacatgacccaggcttctccaactttaacacgcgtgcaccttacccggggagtttgttaaacagattctggggcctgagcaattctgacacagtagtcctggggtggggcccgagattctgcttttcataacaagctccctggtgatgcggatggtccatgcaccagctttgagtagcactagccggtatcagatatttctatatgatgaaataaaggaagaggcacttactaccaggtgatttccaggttcagtttgatggtaccaaggtcattgatgtcgacagccactacctgaggtcgggctgcaaacagctctttggtctcacaggtcacgctacctaccaggatgtgagttgctagccctttgagctccgtgacctagcagagagagtgggagagaataggccttacatcacagcagaggagaaaggtagaataatgtgtcattttttttactgagctaggttggtcatttctttcagaatcatatctgaaatcagaagcggattttcatttttctttttcttttttttttttttttggagacagggtctctctctgtcacccaggctatagtgcagtagtgtgatcatggctaattgcagccttgacctcctgggctcaagtgatcctcccacctcagactcccaagtagctgggactacaggcacacggaccacgtctggctaatttttgtacttttgtagagacggcgttttgccatgttggccaggctggtctcgacctcctgggctcaagtgatccacccacctcagcctcccaaagtgctgggattacaggcgtgagccactacactacgcctggccagaggtggatatttcaaaagtgtatcttagattgactttacttactctgatgagagggcagctgtctttgtaatagacttgtgcagaaaagtctgtgggatggaggggcaacaggcaggggtcacgggtaagggccccaccaatggatcatccagccgtggcaccaggaaagacaacaggcaatgacaatactgtaccttgatggagatgaacccaactatcaggggcagaaaaactgtttcttctccatcccagctctgcttgccatttacttctattttgcctttcagtttccaccgctgccggccatacttcatgaaaatctggagaggagacatccaagggccttcatgtcttgccaccccctcttctccaccagaacaccaagatcaaaaggagaaagacctaaagccactgctgccctccgcttctcccttactctccctccacccccttactcttgggtgtgaatggagctggggatgagtggggaggagactttttttttttttttgagttggagtctcgctctgtcactcaggctggagtgcaatggtgtgatcttggctcgctgcaacctccgcctccagggttcaagcgattcccctgcctcagcctcccaagtagctgggactacaggcatgtgccaccatgcccggctaatttctgtatttttagtaagacggggtttcaccatgttggctaggctggtctcaaactcctgacctcaggtcatctgcccgcctcagcctcccaaagtgctaggattacagacataagccactgtgcctggcccgagacttttaaagcacagtaagttctgcctgcctgagacagggagggtacaggttttctgtagtaaaaggtcattgcactgtgcccttctgctcactcatgccaagcagttctctctcttgttagttctacttcaatagagcagccacacaacccagctcctttagtgagatgaggaagtatcagctaaaacccccttagcagtcagaagcaagaaataaagacatccttactctggatagagagatggagctggcaaggactttgaaatccaacatactcttgggggaaggtgtgcaatatctccttggtcagactgctttaatgtttaagggaagatacaccctcaccccctgctaagaggtatgagtatagagggttttggaggagatgttagatgaaatggttatataagtttccttttgaagagggaaaataacaaaggctatttttactttttggagcacatttttacaaagaaagatctggatgttatttttcttcagtcatggtacttatgatcagccatgatcctggattggcccttggatcaggaaaaaaaaaaaaaaacctgcttacctagtacaatattgggacacctggcaaaatatgaacatagactaattccaggtgacgttagctgaagagccagtgttataaactcactggtgttgagggcttagtaatgcctatgtgacagaatgtctttccattcttagaagaatttagggatgaagagtcctggtgtttgcatcttgctctaaaatggttcaggggctggatgtggtggctcacacctgtaatcccagcactttgggaggccgaagggtgggcgggggggaatcacttgaggtcaggagttcaagaccagcctggccaacatggtgaaaccccatctctactaaaaatacaaaaaaattagccggctgtggtggtgcacacctgtagtcccagctactccagaggccgaggcaggagaatcgcttgaatccaggtggcagaggttgcagtgagctgagatcatgccactgcactccagcctgggcaacagagcgagactccatctcaaaataaaaaataaataagtaagtaaataaataaataaataaaatggttcagcaaaataatagtaacaatgacagcaataatgatgatgatgacagagcaaatgtggcataatgttacaaagtggtgaatctagatgaaaggtttatgggaagtcctgtaccagtttccagactttctcattggcttaaaatgtttttcaaaattaaaaattaaaaaaaaaaaagacaacttgaaaagcaaaataatgacatgacaactggcccctacccttcaggtccataattccagcacctagaccaagacaatacttacttcatattgatctccaggacagaggcgtgcaaagccagccagacctgtaaccaagaaattggaaggtgaggtgtagaacatatttcccctctctatagacacatactggcacgttaaaaagaattcaagtgaagtgtcagaactttgtgcaaactcacataacactttttggggccattcctggggaacagctgtttttgggggagttccttctatcacaggtaaagaagacattcctggatgaagtgatggaagaggtggtctccaaggcaggggaggctgggcaaggaggggagctagagctcagaatatcttgggctgatttaagatccaagtggattctagggttagggtattagggccagaaagatagatttatttatttatccaacatattcccatgaagataatctggtctcctatttttctttctgtcctaaaatgtgtgatttttaagtgcctcccatttgagttaagattccatgcagttatttcccttgctgccccccaatttactcattctgatgttttctttatcctttttatctggtgtaatgatacaatttgctgttataaaatccctgaaaatggattattacttacataaagctagtgattaagaaaacaaaatcaatccaaccaaccaaatgatacacccccaaaagaaagacgggacttttcttctactgtgccatccagcaagtcatgtctaactggatctgctcgattcgagatctctctctggtgcagcagcaaaaacaaatcttatcagactagatggccaccatccgaggccatctcaggaactctgggtttgtccagtctttttctttctttttgtagatatttactgagagccggctatatgtaagggtctaagctaggcatcggggtaataatttggaaattaaagattttatggatacccatgatatagaacaaaatacagttaaagcccacagaaatgaaacagacaaggacttgaaggcagtaagatggagttacacctgaggttaatttgtttgtctactggctatcctactctagaaaatttacttaacccaagtttcttcacctttaaaatagggtaacagtgtccacttcatagaattgtttgtaaggacaatggacggcatctaacacatagtaggtcgttaatacatggtaatgacaatatatccaagagtgggataatactatttattgagtacatgccatccactatttaatgaaagacgtaatctatatgaaaagacacaaggctggcatggtggctcacgcctataatcctagcactttgggaggccaaggcaggaggatgacttgagctcaggagttcaagacaagcctgggcaacatagtgagacctcatctctactaaaaagaaaaaaaaaaattagccaagtgtggtggtgcatgcctgtagtcccagctgctcagaggctgaggtgggaggatcgcttgagcccaggaggtctaggctatagtgaaccgtgattacaccactgcactccagcctgggtaacagagtgagactatgtctgaaaaagaaaaaaaaaaaaaaaagaaagaaaacacacagtaaattgatatgcatcagggaggcaaacagcagtggagagacagaaggagatctttgcttttttctgtatttttatgagaatgtattactatataattaaaatgaaaaaagagagactatcttatttaatgtagaatagtttcatggaggaaagtagcatttgaataacagagtttcaccacagtaaaatgaagacatgggtgtacagatacttccaggctgagtgaatggcatgtgtgcattcgacaatgtttcttggatgtctactgtgtcaagcatgaataaacgtgtggggacgaaggcatgctagtcacatgtgcatagcaaatgaggaaactaatctcatcaacagaggcttgtcagtgacccagctttactttaatcagttgtttctggctttagtcagctgttgttttcctgccaatcacaaagcaaagcactttacattccttggggcctaaagactaaaagttttattgaaggaaccaaaataatttcataaaaataggtaaaaatcttcatcctttaaaaattttttgaaggaaaaaaaataaagttttatgagatttccagttaagaattcagtacaggctggacgtggtggctcacacctgtaatcccagcactttaggaggctgaggtgggcagatcacctgaggtcaggagttccaggccatcctggccaacatggtgaaaccctatctctactaaaaatacaaaattagccgggtgtggtgtcgggtacctgtaatcccagctactcgggaggctgaggcaggagaatcgcttgaacctgggaggcgggggttgcagtgagccgagatcatgccactgcactttagcctggcaacagtgaaactccgtctcaaaaaaaaaaaaaaaaaaaaaaggaaggacacaaaaccttacatagagtataacctcagccatatataaatggatccccagggaaaaaagtctagaaaaccataccaaactgttaaaaataattatctctggtagggtagaattaaggagaaaattaaatttttgtcaataagtggtaatttttatttgatttataaaaagatgatatacttattttgtaatacagaaaaaagatgtaaaaaagatcacataccttggcagggagtgtgtatacacagaaaagttggttggatattttaataattttaacaaaacttagcactgggtggaatgattatatatgactttattttttttttgttatatttctcaatgttttaaaaaaagaagttactactttcaaagtgtttaaatagagattgaagaagacacgaacaattcctccctgtttacccagtaattttttagaggcactccgaggaaataattttgatgagctggtccagaaacagctgttagtcctaggctgttcccacacaaagacatccatatgacaaatgggtcccttggtacttcagcctccttgagttgctatttataacctttgtgctctgggttgcttttatatttatttaaacgtgattttacccatataaagatgctgtggatggtatcacacaatgtgttttgccttctacaaatagccctgttagtacgctggagactcttggccaggcatggtggctcacacctgtgatcctgtgctctgggaggccaaggcagtaggatcacttgagcccaggagtttgagaccaacctgggcaacacagtgagaccctatctctacgaaaaatttaaaaattagccagtcatggtggcgtgcgcccgtggtcccagttactcaggaggttgaggcaggaggattgcttgaggttaggagtttcaggcggccgtgagccactgaactccagcctgtgtgacagagcgagaccctcgactcaaaaaacaaaacaaagcaaaaaacccagtaagttgagagtcttaaatgaacgcttctactttcacctgacttataaacgttgcgtgggtaagctgacagcaaaaaaggtccccggatgcttaaaaaagaagcatgtgctgttaccatcacttgtcagtaggtggcagaaactcaccagctcgtccgtgccttcctgcccgtggagccagcacatttaaaaacagctttcaataataattagaacacaacaacccacttaaaaagacttactgaaataagagcagaattaaagaagcctgcattctactaataattttctgcagcatttagttagtctttaaaaaaaatacttctgaaagaaagtataatcgacttgtttttgtaaatcctaaactggacatgctaattctaataaaatccaaagtgctctttaaaaacctctgcaaattggtcaggcacggtggctcacacctgtaatcccagtactttgggaggccgaggtgggcggatcacctgaggtcaggagttcgtgaccagcctggctaacatggagaaactctgtctctactaaaaatacaaaaattagccgggtgcgatggtgggcatctgtaatcccagctactccggaggctgaggcatgagaatcgcttgaacccaggaggcggaggttgcagtgaacagagatagtgccactgcactgcagcctgggtgacacagcgaaactctgtctcaaaaacaaaacaaaacctctgcaaattagttcaggattaatctattgcctgtttatgtaattacaatggaagactggttgaaaagaaactgatctgacattgttactagataaaggtgaataaaggggaaatcctttgaaggtgtttttcccccccctttaaaattaccagaaattttatatctgaagaaaacaatgtgagaaaggtacttggtagtgatgtttttttcacttctcagcccatgttactaagcaaaatttcttggaactgctgtagtggcatcactgatcctctgattgtagcaataatgtagcacaatggcactatccaggcacaaacagcttttgtgccgtgcttcttaaagttctatctgctgtgtaagccactggtggtactggccacggaattagcactaacagtggggcaatgacagttacagtctgtctttgaggcctggccaggtttcttacaggctcttgtctgggggcctgctggcattttcacagttggagaaagctgcaagtgttcttgacagtttgtgattaccagtgcatgatctagaaagcttaatgaaagctttctagctttcactcaaaaaaccatcatgggggttacctctgaggatgcgcactgggggcttgcaggggtcatacctttggatgtttcacggcgctcacatattactgatctaacacctcctccacagcctcgtttggagggtgttacagcagctgcctactcttgcctgccttcctttgctcagacaccattctgccagaagaacgctctacatcatttttcccagttctatgatgatctttccttccaagagtcacacttcctactttaagacaaccaagtagctatacagtcaggagctcctattacaggtgttactgatctattgaccaggcataaataatgcaagtttactagctcaatggtggttcttccttctgaggaaggttgacctgccctggaaactgtaaggaccaggatatatgcactgcctggaacttaatttgaacaaagtaataatttggagaactagtttgctctaaggaactacatccctttacctccatcctgtttgatagtttgcagattaagtgctctccgtttagcctggcattcatggatttttatagtcaggacccaactaattctccatagctcttctccgaacaatcacgtcagccacaccggtctacttgtcacctctgaacaggctttcctctgtttggtgaatgctattctggtgctgttcaccatacattacactgggatgccttcctctttcctgctcctctccccaactagagaggtgagtggcaaccttttcctcctctcccctcctgcttttgcagcaaactgggtcacactgttgttcaggtggtcatttgttccattgaatgagaatgcacagcctcatatgtctgttttctctggtagaccatgtggaactcaaggccagggagcagtcatcagaatgcagtcaagtgcctggccaatagcaggcactcagtaagtacttgctctattatctttaatgtcactaccccaaaaggttgttttctagtgttggggttggggcaaaaagggaagtgaggaagggtgtggcacgaggaagttagtggttgccaggtctgagagtattgtgaaatagtctgtttgtcaatatgtatgttggaagtagtttttaccagaatgagtaacagatgagaaagcagctaattgcaaagacaataggatttcttggcagcatgaggtttccctttctctttatggaggaagagaaagatttccatgggggtgtttaccattgaaagccttcacagatgtagtttctgagtttgcctgttagatgaggaaagtggaggagacaggagtctatcaatgaggaaggagatttagtctcaggcctgagaaaccccatggaagaaaccaagcgttcaggtggactctcaggaacatcaggcaggagagcaagaacaacagagagaggaggagatggaggagcaggagcaacagcaagttcatcagtccatcagggctgcgatgtagcggggtggccaggtcccccagtaggtggcagggactccagcatcatctcctccctgaacaccaagcctgaagctccagatctggtccgagggtggtccctttcctccccatcccactcctagggtgtctctgtgctaggttggagaggatctgcccgtgagggagaccattctttgagcaatggtttatattgtctgctcagctctgaacttccctcataacatggagttagaggtgggaatgcattaggaacaaagaaccctggaattcagtttcttgtctgactccaatttaagtgtgactcctgggacaagtcatttagcctctctaggcccctatttcccatctgtaaaatcaggaaattaccatcccaccaaaaatagatgcacttgataatactgagcatcagaaataggagaaatatagtacttttttatattagcagtgataggtgatgtgcatgatttgaattactgttaggctgcgagactctgcgactgtgctagtctgtgtgggtggcgtctgagagttgggggaagtagagggaaggttttctgctaaacactgattcagggcagttattttccagaattgatcaggctgctgatagaatcatcctcaaagttaaaataaaaattccagggcccacgtgggactatggacctgcgtgattttggaaccactgactcaagtgaggacccaaaaatgtagagaatggacctaaaaaatggaaaaaagcacagatgccagactcagtagcaaagcaagtgttgaaacttaacactgaatactaaactgattccctaccggatctgccggaagagaagcatgcagccatttgggaagctgagggtcaaggtcatttatattccaggtattctcagacaggctcttacatgtcagtgcctagtgcttgacagaataatttccctcctgagttagatgattcattggaaaatgaagccctcctgtcgagccctttcaaaaaaaagtctcctttctttactcccttaattgcagaaagtagaaagaaggtgattaaatccccattagcaacccagggatcaagctgctaagaaacctcagaattgcataagcaccagccctcttcactgcagtcagatgggccaaaacttggaagagaaattgacttgctgtgatggccgctcatttgacagccatgcctggccactgagccgtaaatctgacaacacctgagcaatgctctattttctaaaaccagacttcgtttttgttctgaagatgctgtggtttaactcaataatgtgtctagtttggaactttctggaataaataccagaaaggcactgggaggggaaaaattctctgtgggtttaacaccaagatttacaaaatttcatagttagtttgctagaaacatgaggagctaaaggaagaatttaaagatcaccccaaagaagccaacagacaagctagaatgtgggacattctgtacaatggtttctacagcaagtcaagggtagaaaaaaaggtagggagaggtttgttttagattaaaggaaatctaaaagatatacctaacaaccaattgtaatgcatggaccttgttgggatcctaatttgaactaatcaaatgtacaaggcatttttgagacaacgggggaaatctgataatggaatgggttaataaccagggtttattatttttgttagctgtgaaaacgtgacagtacttggcatcgtggttatgtaagatgacagccccatgctttaagagatgcatactgaagtgtatagcagcagactgacatatctgggttttatttcatcaaaggacttctcttttatcaaaggaaaaacaaaagcaaagagatggagcaaatgtggcaaaatcttgctaattattacatctaggtgatgggtttatgggggctcattataatgttctctccacttctgtgtatgtttgagattctgtcataatatttttgtgtgtgtaggtaagcctcaggatgagaagcatcagtaaactatcaaaagtggggtgggttgagagtgggtggcgctgcgtctttgcaaggaaaataaaaatagcatgggctctcaaacttcaaggagctctgcactctgcagagatggctccttattctctctaaacaaggaaaataatacctttcatcttgatggagaattctcccagcagattctctagctccacttcaatggtgcacatattctgcaaagaggacaggagacgatcatgagagctagcctttcacccaacagctcaaagcacacgacgttcgaacagcagcacaaccactgcgtgaacaacgagaagcatttacctgtttgctccacacagcacagcctaagaaacattcttgacaaaatgtttgatctgagtctaagcccaccttttagtgtacaggaaatttagggcatagatgagcaagtcagattatatcaaaaatagacacattcagaatgtggggtagtctataggaattagcatgaattctacaaaaaggcagtatcataggggaaaaaatttctacataaagagactagacaaacataatcaccaaatgtaacaacttaaccttgataatatcctgatttgaaagtaaataaatcaaaacatttataaaagacattattgatccaaatagggaaaacttgaaaatggacaatatgttatataattctatgggatgattgtcaattttcttggttgtagtaatggtatgtggttatgtaggaaatgtagatattccataggttactattaagagatccctggcttgatttagccattgtattacatatttctgtgcatacacacttcaaaacatcaagttgtataccataaatatgtagtttttatttgccaattacaaataaattttaaaaagagatccaggttaaaatacatatagggtgaaatgtcatgatgtctatcacttactgtcaaatgacttgagggggatttgatcatatgagagagagggaaagcaaatatggccaaatattaccaattggtaaatctagataaaggcatatggtgttcaatgtacaagtctttcaatttttctataggtttgaaatttttcttaaaaatttggggccaaaagagcacaagggctgaattctgctcaagtgagtaaggcagacttcctactgcaaacctacagcgccccaaaaattatttttgggtctgacaagggtcttctctttgatgttgaaggaaaaggatagagagaaggagtaacaccatctgtgcatgtggttagatacataactagcctcaccctacttcctcaatacctgaggacctaaatagaacaattgcagttagaaatgaaaagggaaagtgctgcggccatgggccatccccagggaggcccttctgctgcttgaccagcttacaatctggatgctgcctctgctatgctaagcagcagtctccattgaagcttgatgcagggtgatgtctgcaggcttctccctcagttgccagcctcccacaaggctaggggttcgagggtggcctcactgacaaaagcatggccagcttgattagtgcaggctggtattgcttccatttgaattctgtatgctgaggacctcagcctagaggttctgattcttctatgtttcgttgttctgctccaaatgatcactctcatgggatgcaaagagaatggcattgctttttcccttgtaaattctcactacctgaactagctagcaaggctggggaaaacttcctgaagtctgagctctgcgtagcttgaaagccttgaaaacaaagcctcagtattataaaccaatttatttcctcagagtattgggcacttctgtgaagaaacagtttccagacatatcaactatgctatcatgcatgtcaggattgctaccagtatctctgaaaaacgtgagagcagctaggttaagacttgaggacatccatggtcaaaattttcctcccccgaccactggcacccccccaccacccacagccactgatgaacattgctgcacacgaaaaagcacctgagcctaccttgacctcattgttaaatcctcattttaaaccatcatcataataacatgctggcttttgtggttatgtgaggatgtatttctttcttgcttttttgtttttttgagatagagtctctatctgtcacccaggctggagtgtagtggcgccgtctcagctcactgcaacctctgcctcccaggttcaagcgattctcctgcctcagcctcacgagtagctgggattacaggtgcccgccaccacgcccggctaatttttgtatttttagtagagacggggttttgctatgttggctgggctagtcttgaactcctgacctcaagtgaacctcccaacttggcctcccaaagtgctgggattacaggtataagccgctgcacccggccatgaggatataaaaccacctgataccaaatgaggtatgaggctacagaagtcctggacttctttcttctctaaggcagtttaaattgcactctatgtctttgaatttgtgagcaaggtcatgatgccatgccctggcacttgatcaagggtggctgtgtctgaaatgacctgcaaatatgccaacaaaggcagcccctgcattctgctggtcagttatctgcatttgtcctataaacatcctttataattggaaacggctctcctcatttcagagatctgtagaaatggggtctcgtgaactaggactgcttctaggccaggaattttcaatctgcagctctacaaagtaggatgggggagggtgggaagagtcagatctttattttcactatcatttaactgaaattaaacatgtttaggtatgatgaaggtagaaaacaagccacagcagtattagccatacctgtgactttgacactgatagaaatcacatatatgttcatgtcacattatttattgcagataactttttaaaaaatcatttatacttttcattactttgatgtttcagtagttattagagccactactagatcttataatttgatgtgttaataaagcagcagcatagaactatgtcacatatttgacttttgaaatattttgaaaactatactgatgattttgaaataactgtatttcaatatattttcttcttttcaattcctatgtattttattttatgcatttaaaaaacattattctaggccgggctcagtggctcatgcctgtaatcccagcactttgggaggcagaggcgagtggatcacctgagatcaggagttcgagaccagcctggccaacgtatagtaaaactccgtctctactaaaaatacaaaaattagccgggtgtggtggcacacacctgtagtcccagctacttgggaagctgaggcaggagaggtacttgggaagctgaggcaggagaatcacttgaacccgggaggcagagattgcagtgagccaagatcgcgccactgcactccagcctgtgtgacagagcaagactctatctctcaaaaaataataaaaaaattattctaaaggaggaacttaggtaaagaagccctgctttaagtcaaataaagagagaaacttggtttagacaagaggcaacacgggagtgtacacacaaagggatcctactgacagtcatccaagctgtccttctgatcccagggctgaaccagatgctcagctctgggaattgtccaacagaccctctacaggctgatgacttcattcatgaaatctgatctctgaacaaagactcatgggatagtgaggagtgctgctttaataatttagtcatttcatcaaagacattggtattaggtgaccccaggaggagtgaagacctctctatgtcagatgcttgggccccagagagttggaaaccaggaaagcacacttctgttcatggttcttaatcttggctcctttatgataaaaatttctcacaattaaaaaaaacattgtaggcagagggttactgatccaacactgacatccagtgtagctatctgaaccatagggtctgctccacttccagggataaaactaggctcgatttacactagaatatttagaagtgtgtttaaatgacacaaatcagggcaatgtggtttacgcattcattttattttattttagagatgtggcctcgctctgtcacccaggctggagtgcagtggcgcgatcgtagctcaccgcagccttgaactcctgggctcaagcaatgctcttgcctcagcctcttgaataactaggactacaggcacatgccgccactcccagcttattcattcattttaagcaattctaccgattgcctttcttgcatactttttaggctaacagtaaaacctatctttctagagggtggaatgaggttgtgggttgctgtttgccttgttcttggcaattaccaacaattcacaccaggccagatgggattcggcaacttaagcaggttagggagttatacctctgtgtactccttgaagctccgattgatctctgtcagactctcccgggcagctttgctggcaggggatgttgcgaaggcttgcttcattttgctggcaccatcctggaggcgtcgctggatacaataagcttcatagagttcatctacctgccagaatcaaaacaggaaacagaaataaatgtcaggcttgaaagaaaatacatagatcattgttacatgcttaatttactttatatttctgacctctacaaagagaatcctgtagaagtattatccttttagatagggaccaatcgtttttattgtagccactgtgatacattttgtctcaaaacagattttgctctaatcctgttttcaaattatgcaaaagggaagtgcctctcttgcattgtttgaggctatcattggaattgtttaaaatgactcccaggtgactttgtgggttcatgggtggactgtaagtattaaataagaaagatgagagctttctgtaagtattaaataagtattaaacaaataagtattaaataataaaaataattaagtattaaataagactgtaactattaaataaggaagatgagagccttctgtatatagaacaaacactgaaagggtttgtacaatttcataccaaggtgaaaactttgtagtatcctaggctaatatcactttaagaggtagtgtcacaatattaggatttgtaatcctgatatttacacatccagatttagtatttcataaagtaacttggggatatatattgaagataacttttgtaaagtcttggctcaactgtaaaggaaaaagttattcttaaaattagggtaaaacacaattatctaaatatatcaaactgaacacttaagaactcaactctttttcgtgtaaattatgtgacaattacaaaaaaataaattgaagcaatataaatgaacttttcttttgctacacatctacacttatgcttctaaataataacaatatacccttttcaaatgactattgattttatactcatataagcctgataatcagctaattcttctaaggcagtgattctcaatcaacccaaggcaattttgacccccaggggtctactggcatctagtgggtagaggccaggcatgctgctaaacatcctataatgcagaggacagcttcctgcaatagagaattatccccaaatgccagtagtgctagggttgaaaatttttttttttttttttttgagatgaggtcttgctatgttgctcaggctggtctctaactgctgggctcaagtgatcctcttaacctcccaagtagctgagactacaggtgcacatcattgtgcttagctaaaaaaaaaacctgttctaaagttattcctaatgatatttatctctataagtctggtactatctttaactgactgcagttaactacaagaattttcaggcggataacaaacaacaataccatcaggcattgtcaaaagcaaataaaacctgttgctttggggaggcatacttacctagcactatttgaattttcatttcagtatgaactttgtttcttcaaaaaggaagcttaactatagatccagaagaaggtggagatgcatatactagatttcagagtttaagagtcccgttttgttctgaaggcaaacttttggctgctcactaaaaagcattactataacctgtttgaggattacaattttccataattgcattctctacacagatatcaatgacacttagtttagaatgcaaacatgaagagactaaaaattattctcttgattaaaggattctttgttgctatttacttcaacaatgcactcaactctgctgagaagaatgcccaaactgaaaagaatcatctttaatcttcagggtcagtggatttatctttgattaagagggagatataagactcaaggagtgtcctatctgctgatgacatcttttggttgatggttggcatagagtgtggtttccgtgctttaaagctaagcctcatctggtgagcttggtaaaatgctgatgcccaggccccactctgagatgctgattcagtaggttagggctgggccaggaatctgaaattttaaataaacattgcaaattgttctgatgtgggagatccccacaaaacttttagaaacccaagtgctaatatctcttccaatgcaggtcaggctatgtcacccatgtggtcttctggggaactgcccttgcaaccctttcccctactagtgggtacgccaaagtttctgagcttgttatcctttcaataaggagacagtgcccacaggaccatcggtatagccataatgacttaatctattactttgtgtagtgagaaagtttattctttgtttttgcttaaatatcaacctatcctagccaaatggaattaaacttttggataaagtatacctaggtagtcaccttagcagaaggccatttgtaggcaagcatttatcttacctatcagtcagcagtggctcattaaataaactgattaattgaatcattcaattacatataatttgttaggcgtctgaatataagatattgcaaacagaaagagtaccactgacctttgaaaaccattgggattgttgtatctaacaaccatggatgcaagattgataaatatacccttacctaatactgattgttttcttgctgttttttgaattaaacaataatatgtcaaagcttgcctgccacataaataccttctgatggatgtcattgttttatttattgagtttagcagaaataggagcaatttcagatttgcctaggtagtaaatatctttcaaagcaagaatgtacgaaggcagtagcatatacatgtatatccatacatacaaatcatcctagaattttaaaccagaaaggattcttaggatcatgtagatcaaatctgtgtacctccccagctccacttcacagagtagaaagccaagattcacatagatgacatagcaagtgagtaggtggcagagctgggaatagaacctagggcttctgactcttagagagatctgctaaaactcccaggctccccacttggaagagaggctgatagatatagacaaacaggaattgataatggtgtgatttagctgcctctaaaggtaa

SEQ ID NO: 32 - DNA, 182988 bp, Homo sapiens
gaattcattaatccaacaaatttagcgactaccaagagtccaatactgtgcacacagctcctctcctcattgtggtgaaataacctctgcagctaattccaggtatgttttccagtgagtattttctgatcctcacaggtagataaacttctcccagttctcctccccagtgttcttagcattttgtcaattcttacttcatggtcagcctcatgtgagaatcaggcagccctggctccttggagaggcacaggttttcacggcagatggacatgggtgtgccctatccaccttcaatcactgtgtgaatgggtatgcaaattaattatttaattcacaattttcttatcttcaaaatcagaaataatatgacttgctttacttagttgggaaaaatatgtaggatattgtacataaattatttaaatatagagatgacattagataaatattaaattccttcccttctagaatgcaggaagtgtgcactttcatctattcatctcagctcttggcagagtccctgatgatttggggggagatcaataaaaactatgaaaacaaataagagaggggaatacagagtcattaaatcatgttggtcttttaatggcagcagtaactgaacaaatagaaaatctgaaagttcccaaaactaatccaacaaaaaataggtttaagatatgaatggatatttcttaacaaaaggatcccatagtcaacacaaccaccactggtaagctttaatttgaagattcactataagttctcttcaagaaaaacccatttgactatttgagctaagtgtttgacattccatttcttccatcatgagaaagctcttaatttgctcctctgtgggtgtctcctacttcatgacaaatccaagtccctggggtttacttggtcccaggactgacacaggtcaatcctagttgcaaattgccatgcagagtagaacctgaaaaccttcccagtccactgggggccatgctgtactgtattgctgaagtcaatggcacatgctaaaaagcagatgctctttcattgtctttagaagacgttcttgacttccactgtggtgatctaaacatgccaccactactggccaagcaattacttacacaggcagtgcggggaaaggaacagtaggtcttatctcattgtctactctgccatggtcaccccatacctatgcacacatggactccatattggtcaatgttgttgcaggaagtcatgcccaaggggtttaactgaaaaaagcttagaaaaggaacaatttcagaggagaggtcagtgttgaaggggctaagtggggttagtgaagcttgcaggcaccagcaaccacaagaagcctttgccagcccaggccagagaagcatgtgagagccatggaagccgtgtacccagcaaagaagccatgtacccaacataggaatacagccactgccagatccatgtggaggtagggaggaagcaatggaataaacactctaacctctctatcttcccactctccatcatctgctggtagcccccattggtcaactttaatgagatgtcaggaggctagagatcttgatgttatagatcctggagatcagcttgcctgggaacactaaagggcagagaatggatttgggggacactggagcacaatcagcataagctcctaatgctgcagcctttgataacatggattcattctctttcctcctcccaatgcaccagaatgctggaaggagaatgtttgactcagttatgaagtgtatcccaagtgagatttcttctctgataaattaggtcttgatgttgagcccagatcccccatttgagtatttccttgtcctttcaaaggctgtacttggtggcttttgtgcaggtctcagtcaatgtcacctcaatcaagaagatggttcatgacattgaatcttaagcaggaaggtatcaaggtgctagttctccacaaggccccttggtcctgctacaaatttgactactgccacctttgcaaagttcagtttcctttaagcaatatttacgtgagaaacagaagctgtttttaaaacaaaaacaaaacaaaaagtaaacaagaaaaaaacctgttacattctattgcagattttctacccaagtaatcttacttagaataaagatattcacaaatatggcttcctgtttggacataattacttgagggaaactttaaatgagaatttcatggaaaaaaaacccacagaaaaacaaaaaacgagataacagcaagaatatgtgtctgtctgaatgtttatctagacacagatataaattgacagatatctgttattataattattactatattatttcattatcatcataagcctggtaaaacgaaattaaaataacaatgagataattacgtttttcctgttggcaaaagtgatatttaagacattatttaactggcgtggcatagagaaagttcctgagagcttgttccctcagttatttatcctgtagttgctagatcctggggaggctggagggcccagggtagagtctgggttgacttggtcaaggaataaacatttaaagagcttcttaacaatgatacaaatgtatttcaatttttcatgaacctatataatgtgtacaggtgcattgcaactgagtaacaaccctgcttattaaatatggcacagtcctctgctaatggggtgttggagaaagggcaccctcagtcatttctggtggcaatgtgaattctcagagcctcttagaaaacaagtatcccatgtaaaataaatctgttagatatgctttatattatttaatacttagccactttcctgccctcccctttacctcctgattccagggactcaataataaaaatgataatattttagattaatattagtgggaattaacagaacatagaattctccaacactttggaatttatcccatggaagtattaataaaaaagaatatatcaatacttaaggatagatatactgatgaatttattgtcatgttatgtgaaataaaacatttttaaaaaaggatctgggatcaaagaaatggctgaattatctcagaaataacataaagagcaggagcgactgagttaagcagaatctgtccatttctgcagcaatggttttaatagcatcttttaaagctccaactgcaccatgatgagccaggtttcacacagcactttgacaacacggtcttgatgtttctcagccaacatctcctgagatccacaaatgggtaatcactgacttttcttcccacattggagccctcaagattgtgtgcaatattatgctaaaggcaaacctcatgtggcccacatgagatccttcagtcctctgtcctcagtcctcagtcaagcaaaaaggttcggggaggctcagtgttccattgttgactctgtgggagaaatgcagttggcgagggttggatgggttatttcagagcgtggaaataaaaaatggaaatgcagttccacagtcagctgtctacctcttggggaaacttgtttcacacattctctagttttcattcatggtcttagaaattcatttgctatgcccagatggatctcagggactcagaaatgatatttgtaatcatgagaattttaggaaagtgagaacaggacactctgtctccagtatcatttccatccttttggacacagcctcctattattcaaacctgtcaagccacatgagggtggataatgggatactggagatctaaaccagccaaataggcagagcgtcattgagaatcatattctagctgttccagagtgtgagccttggatggggatcagagataagcatgaaggctttcacaatgaaatttataaaaattatgcaattctggttcaaaattttctaaatattttaataaaaagtgaaaatgaaaattaatctccaggtggtttttgttgtctcacatgtaaaatggataataatagtcaatttctcactggagggttttaagggtgaataagatagtattaatcaatctcaaatcatttgttgaatgaggcagtagatagacagacaaataaagtaagataaatatagctacatagatagagactggcagctacatgctgatggtgaatattaaaatctgagctcagtgttcattattcactaggtcttcaatacatgtttgttgaatatattgattattagaacaaagttttgttttgtgtgtgtgaactttgaatctgtaaacattatgtcttcacatgcaataactatctaaaagttaggataaaagctgtatttcaaaacgttgcatttccactggtcaattccacttgtagagtattgaacaattatccaaagcagttacaaggacaagtatcttctgcctgagctgaaagcataaacttccacagggcagatacctatctatgagtacggagtccatgaggaaatgtagatgcatcactttcctacttggagggaagagtttctatagatgatgtgtgaggtgtatgtagggagtgtttcatgtacaaattggtctatacaattataagctgtatcttataaaattattctatcttggtcatttgtgaatacaacctggtttggatgaatctagttaccaacttctgataacaatgacattaataatgatgatgattgctagcactctatgtacacagttctgtctgagagatttgtgtctattaactcatttaatatctccaagagtcttatatgttaggtcctattaacatgcccattttcctgatgaacccactgagacacacaaaaatgatgaatttaatgatatcacacatcttataaatggcagagctggggtgagaatacaacaatctgaatccagaatttatgctcttggccactaaaaaacacttttttttaatagcataggaaacggaggcctagggaaaaaaaaaaagattaatagttcagcgccaaggttcagcagtgccttttgatttaattagtacaaatccactaaatgcttagttcagtccagcaaatgggcaaggtactttctatggttctagtatttgtgccctccaaaatttgtgttgaaacttaatccccaacgtgacagcattgaaaggtgaggcctttaaaaggtgattgaatcagaagggttatcccctcaaaatgaattaatcataattaatagactaacaggttatcatgagaagggaactggtgactgtataaaagaggaggagagagtcaggaaaggccctggcatgttcaagaaacttcgaacaaaaggcaagtgggcttgactcttcccgtgactgatttagtcacctcctctctctggctgataatggtcaatcttttgataatgacatctccttgtcccttgacctgctcacagacccagtgatcactctatgttggttttcagcatatttttgtgttgatatgatatccacttttccaacaatgggatgagaaggcaaaaattgaggaggcaactcttggaactgtctctttccccctctgtgctcagtctgttctctcttagatagcacattaatacactcagtccccttgcaacgggacaccctcctggggaggaggacacacctccttgggactctgcagagagtcaccaccagtaagaagactcttaccagattcagccctttgacctgagacttctcagcctccataactgtaagaaataaattagtttaatttataaataacccagttcagggattattttataagcagcagaaaatggactaagacagtactagagagacaacagagaacaagctgggttaagtccaatctttgtcttcacagagaggaaacacaaatcaggacacagagcaacatgagtgggtgctggcagtaaagtgttgtggaggccatgctgctggaggacaaggaacagaggcagcatcgaggcaccagggtgagagccgaaggatgattgagctggcccagtgagtactctggagcttgacactcaagcccgctgcactagaggaaaatatcaacctcaccatagccttggaaggtcagaatggtctggcccctgactgcccctagagtcttatctttgccacattttcctgtcctttcaggagtcaagcccacccgcctttttttcaaagtttcttgaacatgccaaggtcttttctgaatcatgcctccttcacatatgctcttgcttctacctaaaatgctctctgtctctctccaaagctaatgtgatttccccacctcagggcttggttccatggcttcttctcagggaggctgtgctgaaccactctttgagtagtttcctccaatgatttcaatttgtgattgttaggagttgagttacattgccgagaaaattcatacatcaaagtcctaagtcccagcacccgagaatgtaaacttatttagagatagagcctttacagaggtaattaagtaaaaatgaggtcacaggagtgaggtcatggaataggggtgagccctattccaatatgactggtgtccttataagaagggggaagtttggacacaggcacacacacaggaagaacaccacatgaagatgaaggcagaaattgaggtgatgcttccacaagtcaaagaaagccaaagattgctagctaaacactggtagctaggagagcagtttgggatccagcccttcaataccttggtttcaacttttagcctccagaactgtgagacaataaatatatattatttaagccaagcagtgtgtggttctttgctacagaagccctggcaaactaatatagtgattcacactttatgggtctaccacaagctccatggagtaagggagtatgtgagacagtcatcagtgcccttaacaggactggttaaagtgcgtacttaaggaactcttgccattaactgattttcctctcctctcccatctgctccctccttccttctccctttcctctcccctctcatcttccatgcgccttgcttatgaaataatttctggatgaagcaatctgtaagttttcagaacttgatcatagcttgaatcaggtcaagaaacaactgagaccaattggcagatcagatgtcaaggagaccccccacagacatcctaccaagagaccctgatctaatttctgggtggtcttaggcatagcctgttttctaaagatgggtcacaaagaacttatagagaggcacagacccagagggaaagtaaaacacacatggcttagtggtgctactgaagcccgatttagaaccctgtttctttctaactgtgtgcccttgagatatctctttacctccaattcctacttatctataaaccagaaataccgtgtcatctgctttgtacacttaacaatatactgtgagtctttttttctgttacaacaaatgctgatttaacatttctttcttaatatttgcaaaactagatatatggtatatatatattcacacagtatatatggtaacatatatggtgtgtatatatatgttatatatgatatatatatagtatatatggtgtgtgtgtgtatatatatattcacacagtaatgtatttagccaatagtcattattatacattaagatatcttctaaattttgccattataatagttcatgtgtatatatgatgtgtgtgcgtatatatatataaaaatatatatatgaacatatagtcacagtaatttatttagccaatagtcattattatacactaagatatcttctaaattttgctattataatagctcatgtgataaactctcctgtatagttactttatgaacttatccaattattttcttaggctatattataattatttctttaggatcaatttccatacgataaatttaggtctaagaaaatgcaaattctaagatgtcttctacatattgccaacttgtttcccggaaaagttggattcattctcctatcagcgatatatgaaagtgcctgctttcccacaccaaatatcgtcactctttcatgcattaccagcttagcaacattgaacattttcacatatttataagccatctctgcttatctcttcccacatcctgctatgcttgttactcccctagtgcaccacagctgcttgctcactgtgctgtggtccatgtctaggggaaagcttcacccaggctctcttaacttccagcatcctgttggatttggtccaatggtggcccctaaagagaatcagagggtcagcaagagattctctcccctccaccaggccaggccaaggtttttccagtggctgtactcctctgctggtggccaccatgcttgtctggggctcctctttcacagccaggctttggtaacactgccctcttctatgccccttgagatcttgcctgggaaagaattctgctgttgctgttccctgggtgtttcccatcctgtgcatttcttaaccctgtcctcatctctccaaacagtccccttactaccctttcttcagttaccatatgtctctagctagttttattgctgttgtaaccatttttgattttggcatttgccagttgtacatatttgaaagatatattttttaattattcattctttgtaatatattgttgccagtattttccctagtctggttctctggtacatttttttatgctgcttaaaactttaaaaaaaaatcaatacaatgtgaggcaaagggaagtgtaatttagcaaaaagtctgaattatagatttttttaaaaggttataaaatttaaagtaaacaaagttatggaaaatagaaaagtgagttaagaagtctttctgaaacagaggtaagccggacatcattcaatgaacagaaatcatgatgtgaagtaacactttggcagtaaaccgagtttctttaagtggttcaaaaaaattttttttgtcttaggtaggttcaaatttctccctcaaagttgtgtttatattactcattatgtgtacaagacctttcttcatgatttcaaattcaactaacatttcatcaagtatttattatgagccaggtactttcgtataactaacttagtatgagaattctgtaagattggtattctcacctccattttaaggctagaagatcaaagttcatagacgtcgaataacatacgcagagttacacagataaagaataaacaaactcctcagcaggagagatttttcaacctaaaccttttgcctttaaatcagtgctcttgtcacagtatcaaataccaaacagaatacattgaaacagaagtcatgaatatttaacaaaaataaaatttagcctatgtgaaatgatgcctctgcaatattcacattcagtttataagtggtaaaagatacttggtaagaaataagggccaaatacagttgatttgagaaaattttccaaaagtagtgagttataagcacgatggttaagtgaaataaacatttaaaaaatccttatagataaaaataaatactgtaaaaatatactaagaaacaggtggtaaagtatgcccacactgacattagctataaccgatatgctcaaatggatataaaaactgttagtgggaactgcttaccatggactaccttgaatggaaggtacgtagagcatcaaagtctattgattttgggtgagctaacaagagttagtggaccagagactgtattgccattttcctcattttgaaaataatagactgtacaataatagaagtgttatcacaagtgcattatcaaaaactcatgggtgagcctcatctgaagcagagtttgtaaagcatatggcatttatggaaattcctccccttcagtgctcgtaactgcagactttagctgcttccatgtgatgcaagcaacttgccaataaataaagaagagataaaccagtctgcccacatcattatgagcaacagcgtcagaaacaacagccattgagagagggaagtctcttgtggcaacatctggagtagagaggatgtggtggcatttagcttgacacttccaagtaatttatttgtggagaaagacagtgttcactgaatatggcagcattcatgtatgcataatatacttcagaatccaattctggaaagatggcatctttatgatatctgcatctctttctcaactcccaactgctaactacctctatgaacgtggtatcagtagatagaggatgcataatgaggacaaacaaggccttgggacatgcagaaatcttgagagaaaatgctgctgaaggatttctgctcccccaggttaggtgagagcctggaaaccaatggagagagtcctgggttgatgagtggagcatgcagaactagaaagagtgcaacctctttggccctccaaattttccagagctggaaaatgtgtttctgggaagatctgttgacttccctggtctcagagaagctttgtaggatctggacaggtagactgagtcccccttttaactgagtctagtagattattagtctgtagcacagagaccaaaatcctttttctcatatttggagatcaaaactaagatattggtagctgaacctaaactccattggatgggtagtggaaaattgcaaaccactcaagagacgcctaatagttagaaaaaggaaacacaagccatctggtagcaaaacaatgctagagaaggcaggcaacttaaacaaacaaaataataatgcttgagagtacattacagcatcagcaaacacttcagagaagtagacacagccaagtgtcattattggcagtagttgtttaataaagtttctgtgagtagagaatactgaactattgctcttagaggacatacaaggtgaggtttctgtgagcctctgatcacaacaatcttatcaaccaatcaatacataatcttattctatatgtgattctttaaaaaaaacacctgatttagtatatattgtagattcattcatgtattagtccattctcacattgctataaataactagctaagactgtgtagtttatgaagaaaagaggtttaattgactcacagtttcgtatggctggggaggcctcaggaaacttacaatcatagcagaaggtgaaggggaagcaaggcacatctttccatggtggagcaggaaagagagaggtgaaggcggaagtactacacacttttaaaccatcagatctcatgagaagtcactcactagcatgagaacaggatggggaaaatccgcccccatgatccaatagcctctcaccaggtccctcccccaacattgggagtgaaaattccacgggagattttggtggggtcacagaaccaaaccatatcaattaatgtgcctgaacaacagtatagcccatgcctgaacaaagcttatctaacatgtacaattttttagtaaggcacatcatggccttgttgtgcttaggaacactagacttcagcaccaagcttgggagctattttaaatagcaaaactacccaaaaaggcataatcatgtaaaaaatgtggcagtaaatacaccatgaaaaatacatttgtttacagtacaagagctgaagcaataaggtggtgttgtttggcctcagctgggaacatgtgcattcccccatattttgccactctgaggatgtccatgtatgacagtgaaagctccatgggtattggttttaaagttaaaaatatatcttagtaagtagacaaatttgcaaacacagaatccatgaataatgagaatcaactgtatataataattcttttaaactaaaacctttggtagttgaaggagaaggtggtcattgttagaacctggaagaccaagtagaagaaaaatctcaaaccaggagaaaagattaagaaatggggccaggcgcggtggttcacgcctgtaatcccagcactttgggaggccaaggcgggcagatcacaaggtcaggagattgagaccatcctggctaacatggtgaaaccctgtctctactaaaaatacaaacaattagccgggcgtggtggcaggtgcctgtagtcccagctacttgggaagctgggtcaggagaatagcgtgaacccgggaggcggagcttgcagtgagctgagatcgcgtcactgcactccagcctgggcgacagagcgagactccatcaaaaaaaaaaaaaaaaaaaaggaatggatctgtgaggagaaaggcaagagatgaggagaataggtgggttatgtttgatttacaatactggtacttacaggtgaacaaagacagcagctgaagaaagaataataaaaagttaatacattttaaagtatactgagttaaagaaaggcctgagtcagaagcccaaagccttgcccaatcctaggcaagactgatattaaaaaatacacacacatcaagccaaagtctgacactgttcttcacttttggatctcagggataaggagaaaacgtttcaagcttctatgcagaaaaaagcagtaagtttcaaaggtaaaaaggagatagtagaacagtatttggagacttctaagaaaatgaacattgacccaagaattgtatgttaaatcacaataataagatgtacttgttgatgtgaaagaaagatcatcttgcagcctgggcaacatggcaagaccttgtctgtacaaaaatgcaaaaaattagccaggtacagtggtgcatgcctgtagtcccagcttctcagaaggctgaggtggaaggatcacctgagcccaggaggatgaggttgtggtgagccatgattgcactcctgcactccttcctggatgacagagtgaggctctgtctcaaaagggagagagagagggaggcagggagggaggagagagaaagaaagaaagaaggagagaaggagagagagagagagagaaaataaaggaaggaaggaaggaaggaaggaaggaaggaaggaaggaaggaaggaaggaagaaagaaagaaaggaaggaaggaagaaacaaagaaagaaagaaagaagaaagagaaagaaagaaagaaagaaagaaagaaggaaaagaaaataaaggagggagggagagagagaaagaaaaaaagaaaaagaaagaaagaaagagaaaggaaggaaggaaaggaaaggaaggaaggaaagaaagaaagtaagaaagagaaagaaaaggaaagaaaagaaaagaaggacggaaatctgcaaggacttagagaaaatagcacccacatctcacctgaagaaaatgctgaagttcaaacaacaaatgttgtttgttgttaaacatttgttgagagatatctagacaagggaagacagagggttttcataagaatgaaaagtgaatcaagacagaggtagggatacagatccagtcatcaagagtcttggaacacatagcagacacaccaaaaaagaattcctgaaatagaagtcacatgctacaaaggacaatgtttaaacctggaagaaaaaaaactccttctgtgaataaaaccctgaagatgtgagatagatgatggtgaagacaagcatttccaaattcacattacattgaggtaagaggaaagcaatggggatatgggctaaggaaccttggctaggagtcacaactgatatcttattttaacataatagtagaggaagagcaattttgagcttcaagcaagaagacatcattgattgtgctatcaaaaaagatagcatacattctaaactgacaaaggctaaataggtatagacagtaaatacatcagactagcaaaaataaagagaataactgtaagtaacaaagggcaataaataataaatatgaagaagttgaaataaataaatcatatattgttgttcttatactgtatgtcaatgagaagaggctgccaaacttgtttaaaaaaatatgaaccatctccatgtggttgacaaaaaatgaaatgaatatgaagtaattaaaaagtagaaaatagagaagatgagtaaagatataccagccatccaattaaaaagctgaaatagttgtactagtattctataagctgtaattatgcaatttatatattgtatacatatttgtaaattatatgtgcgtatattactcttcattcttcaaatatatactatacattttacatatgtctaacaagaatttatgaaaattgatcagaatcatgactacacaaaccctaaaaaattcaaaatagaagtttgacagaatacatactatgaacaaaatcataatgactataaataataaataacaaaaaagaccaaaatttattgactacttagaagcaaaaaacacaaagcgacaagtgtaactgaaattacattctatctgaaaagcaatgaaaaggagaaaactttatattaaaacccatgggccacaataaaatcagtattcagagaaatatttagaccctaaaatggcattattctggaagaaggaagacaaaatacaaagaaaatcagtccttttcttaggaaataactgagtgtaaacccaaaagtctaatgaagaaagaactattcaagtaaaaactgaaattaataaaatatataggaaaaagtatatacattttagaagaaatacattaaaaatatggttctttgaaaagatcaataaagtatataaatgccttatgagactaaaaaaagagataaagtaaaatatttatgatacaaaatgaaacaggaggcttaaactcatatgtaaaaaaactaaaaattataaataaataatatgtgcaaatatgctgcaaataaattaaaacaaacctagaaaaaaaggatatctcccaactaaaatacaaactaccaaaactactcagaagtagaaaatctgagcagaccagttaccgaaaaaagtattgaaaactcaaataaagatttattcttaaaaaaagacatcaggctaggtgatttcacaactgagttctatgtaaacttgtaaaaaccacctatttctaatgctatttaaaacttctgatggcacaaggaaaatgaaaagctcagcaacgcaactcttcaaccagtgtcactttaagacaaagctctgcaaagttctgaaaaagacacaacatggcaattacaataactgtatgtcaatgttatttatgacttaggatgcaaaatttgcaatattgccaaacacgataatgccacaacttggtgggcttaattccaaaaatactctattaggaaatttattaatataatagtaataaaaatattgataccaaatttatcttcagtattgattgtgcatcagatactctgctacataatgtatacgtattaacacagttaccatctcattgcaaccctattttggtcattgtaatcataattatcattgaactgtgaagacggaaaacccaaggcataaagaagataatttgtatccctgtgatcacatggagagtaactggtaggcctaaaactcccagaaattttggctcctctgtccctgaccttaaccactccactactaagacaagtgtgtgctgggggcaggaggggggtagggtaagctcataagaacaaatgctagaaaggaatttggttaaattcagtagctattatgactatataaaaaaatcaaaaccacgtcatgattcactatgtacatctactcttaagcattactctgtttaagatgttcaaaatggtgaaactctgaagccactgctcttaaaatcaagcacaagatgggaggtccattaacttcaacaatattccacatgtttgatggttatcataactgcactgacataaatgaaataataatttaaaacactgtaaaagaatcctctaagacattgctcttgcagttctaaacttcactcttataccattactctttctgctacctccagcatcagggccattagcatacaaacatcctaccaccttcttgactcacttcgccctccagctaccacagcaaatctttgctgttctttgcatcaaagcacactgaagtggctgctatgtatttgcttattcttcaatctctttctaaccatttattcttatcctacttcaagctggcttttgtcccgaccactccaaccccaaagtgctcatgatctgcaaaaaacctccatgctgctgaagcctgtgtcagtttcatctttttaccatgtgtgggtgtaggggtgtaccacccacattcccctttagggacaagaaattcatttgcccagctgccaggagccttggctgctcacagctcaccaagtccctccccaggaatttcccaagggatttcacccaagattatgttcccttcttggagcagcccacatccagtgattgtccatgggaggctaccgagtatagcacctctacctcaattcaggacatccctgaatggccaccccagccccagagctctttttgggtgctgctgaggcctctgttacagccccattactgctcaacttatttttctgtttagttctgtgtctcttgctttgtttcaatcttcttcctgagggtatacctcgaaaattgtcttcctggaaacctctgtcccagtgtagcttcccagggacactgagctgtgatcctcagtagctttgaggtggttgatcatttccacttcactgacacactggcttcctgtgatccctccaagtagacaaggcatctctttctcggtttcctttgctggttccttttcttcaccacaaattttgatattgtagtgacttggaatcacagtcctgacactctcctccatctacattccattcttggtgatctcattcacttttaaggttttaaaaatcattcatatgctgagaaacttttaatggttatttccaaccctcccctcttccctcacagtgaaattgctcttcccacagcctcccccatctcaactggtgaaaaatccagtttcttaagccccaatcctaaagtcgttcctgactcctctcttttcctcagacccgacatccaatccagcaagaattcctgttggctccaccatcatattacatcaagatttcagccacttctcatacctctgttcagagccgccatcacctctgtcctggatttctaaaagagcctcctaacagctttctgtagcctccttacaggctttttttttttttcaacatagcagccagagttattcttttaaaacataagtcatattgggtcatttatctgctcaaaacactgcaatggccaaagtaagcattcagtagaaaacaattgcctgcctacttcccctgtcttttttttttttttttgagtgtcgctctgtcacccaggctggagtgcagtggcatgatcttggctcactgcaacctctacctcccaggttcaagcaattctctgcctcagcctcccaagtagctgggattaacaggtgcccaccaccacgcccagctaatttttttgtatctttaatacagatggggtttcaccatcttggccagcctggtcttgaactcctgaccttgtgatccacctaccttggcctcccaaagtgctgggattacaggcgtgagccaccacacctggacaacttcccccatctttacaatcagggaattggaatccttctcctgattgaggccactgattggcttctgctgccagcctgtgtaggcaatgagcagactggagtgtcctaccagttactctgtttgcccaaatgttccagcattgctgcacagggcagaggcacaaaaagatgcacagtaaagtcagcctgagaaagcggtgaagggattgaggtcaaagaaggaatggaccttattttttatctctggataaaagcatctatgttaattatagccctttggaacccacaaatacttcttgtttgaagtcaagttctgttcagctactcttgtgctgtaattcaagtttttcttttaagtttatgtctagaaagaaaaaaataataaaaccactgcaatggctccccatttttctttctcttaatatctcttgctctctcttttgctaaaaggcaaatttcttacaatggtctattagattcaacatgaatttccctccataccccaatacttcgttgtatctctgacttcctctcttactaatcctcaacctccatttggccactttggaccccttattgttttgctttcctttctagtgcagctaactctgctacagtttaatttccaccaaaccaggaatcttgggctacttatttaccagtagagtctaagcacctagaaaagttcttggcacatggcattaatccaatcaataaatggtaaatgggtgaatgaagcaattaatgaatgggtgaatgagacaaagttatgaatttctgatgacacttttgcatacctgtaaagctcaagagactatttatggcacatacaccaccagaattagtaagttttgatttgatgagttggctggctaaaaatatcaaaatttttttatccattaaaaatataatgggctagaaatgaaaatgaaggaattgtgacaaaagcaataaaatactttagaaataaaattaccagaatgtatcagacatatatgaagaaactataaaaatctgactgaagccataatattttatctgagttaatggaaagagaaactgtgctcccagttggaaatattgaatatcatagaaaaggttagctcttcaaagttgatgtacatatatatatatatatatatatatatatatatatatatagttgaatattaattagaatgctttttttgaaattgcataaaataatttcaaagtttatacaaaagaatacagcctgaaactgatgagtgttctcaaaagaaaattggtgaagggaagtgtttcatggaatatgaaccatgcaaaaaagcctcttcagctcaaatagtataatatgtgaatgggaataaataaatccataagtaaagtgagacacagtgatacagtttggatgtgtgtccctgcccaaatctcctgtagaattgtacttcccattgttggaggtggggcccggtgggaggtgactgtaccatgtgggtggatttctcatgaatggtttaacaccagcgtcttggtgctgtcatcaccagaatgagtgagttctcatgagatctggttgtttcaaactatttggcacctcccccatctctctctcctgctcctgctcttgccacatacaaactcccacttctcctttcaccatgattgtaaacttccagaagactccctagaaacagataccattgctatgcttcctgtacaacctgcaggactgtgagccaattaaacatcttttctttacaaaagttactcagtctcaggtatttctttaaaccaatgcaagaagaacctaatacacatagattccaagaagaaatcccattaaaaaagggaatgtatagatgataaaggtgatttctacagtaaagggaatgaaagtaggtttattttataaagagttctggtacaactggctgttcatgcaaaagaagatagacctagatctcctttaaatgataaaatagcagtggattaaagttttaactataaaagaaatcaaacaataaaaatcttggcaagtttcaataaaaccattaatagaagaggaaatttttttaaactagaacaggaaacaaaacagctacaaaaaataaatcctaaaactaaaaggagataccagaaattaagtcaaaagaaatatttaaaattattatttcaaaataaaatatttgcaatatatgtgactgagattattattgaatacaatcttttcagattgataactaaaaatctcatataaaatgggcactgaatatgaataagcagttcacaaaagaacaaaaccagttctaaataacacaattaagaaaagttactgagcctacctactaatcagaagaatgtaaattagactacacataatgtaacactttacatcaaaaatttgacaaaaactatagagaataagtacgcctactgcaggcaggaatgtaagaagagaaaatagagttaacagtatacatcactggtggaaatgttcattgttgtgtggttttgaagaataaaattgcaatacctttcttaatgtaagaaaaaaaattacattctttgaaccagcaatcacatttctgaacttctatcccaaatgagtaaatataccagtttaatgtctaactggcaaagaaatcagaagcatggtgttttttcaccgacaggagattgttgactaccatgagatttagtccatggggtgagggagtgtgtgtgtgtgtatgtgtgtgtgtgtatcctcaatatggattttctctttaacaattatgaaaatccacccaaggcagtttatatagatctgactgtgaatatccacacacacaattatatacatatatatgactacatatgtaattttaaagtaaaatattgataatattttcttaaactcaagtgcatgtggaagaaagaaatagagaaaaagagagtaatgttatctgataattaatgggaaacaaggaaaaagaacaagttatccctgataaaataatacagggatggtcacaagaaccggcaggaatcaaagtgattcctgtgaggttgtttaacatgaggtgctttataaacttttatttcagggggtcctagcttacaaggaaaccttttatgggacagaaaaacaataaaactaacactaaagcatttgttctgggggaagtaggattgcgtggccttgggaacactctacaacgtagcccaggctcagaagcaactgctaaagttgttttgcaaaaaccacaggttccaaaagcacatcatatttagaccatttctatagaagccttccttttacaaaactgtggatccctttggtgggccactgggatcttgaatcatggataagccagcttggtgtaaagaatcaggattttggccgggcgcggtggctcacgcctgtaatcccagcactttgggagcccgaggcaggcggatcacaaggtcaggagatcgagatcatcctggctaacatggtgaaaccccgtctctactaaaaatacaaaaattagccaggtgtggtggcgggcacctatagtcccagctactcgtgaggctgaggcaggacaatggcgtgaacccgggaggtggagcttgcagtgagcagagactgtgccactgcactccagcctgggcaacagagcgagaccccggtttaaaaaaaaaaaagaatcaggattttatccaaaagaagtggcaactactgccactaaagcaatgacgagatgactgttcatggtcaacaccatcaggaattagccttttattaagtttaagtaatacagagatgcaagaatagcccaacagccaattaattactcttctaacattgccatttacaatcaagtataaaatataatgtgtatgtatgtatattatgtatgaggatgtaattatatatgcatgtgtatatgcactgcaacatttgttatttttgtatgcattatgaggtcaaaatagaaaatctaaagaaatgatgtattttgatccactttaaggacttcattcagtaatttttataatgattcatcacagtttaattatctcattattttctctttgatgagagaaaaccctgttttctcccattgatactgcagttaaaaattaacataagcccaacaaaaagcttagtaggtcactcttcattactatagaatttatgataatgaacaactggaagccatccaaacagtaaaaagtaggggactaaataaaggaaattctagtgcatctctaattgtaccgtatgtaagtataaaacggatgctcagagttaataatgaaatgtgaattccctgtacctcactagagcacataatagtaatatgtcaaaagtcattagctcttgtccccacttgctcatgacatctcatccggttgtttcggaatgtcccaggaggaatgcttcatctgtgttcactgggaagtctgtcctaagctcacatgtggcattctctttctgcttgcttttcttctccatgatccctcgcttatgtccactacacgcaaaagtcctgcaaccagaactcagcatgcctaccctaaatctggccccagatagctgtctttgattcttctgaaaccacagtcctcctggataccagggaggggcaaggagcccatatttccaactcatcagtgcctcattgtctttgtctaagaagtgggggatcatccccttcataaagttccctcatgagaacccctcttcaaattttcttttttttttttaagatggattcttgctttgtcacccaggctggagtgtagtggcaccatctccactctgcaacctccgcctcctgggttcaagtgattctcctgcctcaggctcctgagtagctgggattacaggtgcccaccaccatgcccagctaatttttgtatttttagtagagacagagtttcatcatgttggccaggctggtcttgaagtcatgacctcaggcaatctgcctgccttggcctctcaaagtgctgggcttacaggtgtgacccactgcaccctgcccccacttcaaatttaaccagaaggtcttttctctctcaagctcacacataagaccacatggacttatgaacctgacaggattcatgccatctacactctatttctcctcttctcaacaaaggactcccttttatctgcaaagtaacacatgcaaatgtttatctgagggctttctccccttctctcaatggatattcctgaccctgccagtagtcactggccaaattcaaactattctacaaacacatgtgaaaatattcctgtgaattacactaagtgaaaacaaggtaacatattatatataatcgtgtgtagaaaattacatagactatggatagtagtaatatttttctatttcgcatattttcaagtatcaacataaattaatttagcataggagaaaaacaataaacatgtatgaaagataaaagttgtttaggctgggcgctgtggctcacaccggaaatcccagcacttgggaggcccaggcaggcagatcatgagttcaggagatcgagaccatcctagctaacacggtgaaaccccgtctctacgaaaaatacaaaaaattagccagggatggtggcacgcacctgtagtcccagctactcgggaagctgaggcaggagacacgcttgaacctgggaggcggaggttgcagtgagcccagatcaagccactgcacttcagcctgggtgacagagcgagactccagctcaaaaaaaaaagttgtttaatttataaataataaaaatgtattatatatgcagtagatgcctaatacacaagtgttgttgcatctaatccttacaataaacctagaagacaacctgctgttgttccagttttatggatgggcaaactgaggttcaatataattccctaagttacataacaagtaatatgtatatctgttttttctctgagcccactcccttttactgggaacttcttattccttctcgttttggtcaggggctcaattctccaatgagatatcccagtaatctctctcttggcctcagctaggccaggctggctttctgatgtttataatacatgcaaccaaaaaaccatacataatacaacaggttaactggtgagccaggattagaacctaatccaaactctcattctttgtataaccttacacttccttgcacgagacaggcaaataaaggactcacagacagaggaacaaaggattgtggtcacaggtcacagatccttgggccagtaccactccttcaggcctggagtttaaaatttgatttaggcctctcatgtttccaaaacattgacctcaaaactgggttcccaccctcaggattaaattagttcccaagttgaattttatgtttcttagttctttgcatcatctctggctcaaggagctggagggatgtttttgattgcacagcaaggaatacagcagggtgctctgagccttaaaagatgctctacaatctcctaagccctgaggggcttccctttggtctggcatggatccctacgaggcctgtagcactgagctataagcacaagaggagcccaaccctgatctgctctctaccactcagccgcttcatcatctgtcctcatttcccaaaccctacggcttccagatcaagtgccaggaactggaaaccttcatgctgagaagctgaatggggcagtgaaagcttcaagcatgtggcatattgtgcaaacataggttcaaacacaggttcttccagggaccagctagttgaccttgaataaattactggcttattttaggtttctcctgtaagaaagggtatagttaagctgctaagaaaatatcaaggactttccaatggaagatttccctcccttctgctcctttgtttcttcctgcaatgtattaagttttcaacaaatatttgttgaatgaatgaacatctctatttaaaactgtcttgcatgacagtgttcagctctgactattctactgaacaatatatattttagaatgatatttattgagcatatgctatgtaccaaaacctacattatgtgcattctttcttttcatttctgagtctcccacatcaccttatataacacctgtagtaacgataatagctaacatgttattggaagaaaccaggatgctaagagagaagctacccttttataacacaaaataaatcagttaagaaagagatttttctcccttctccccagagcctgcacctggcagaaccagcacaccactggtacagcacaccactcactgcaagacatatccctcccctgagcctctgccccgtcattccatggtgttgctatgaatgttaaatgagaaaatgccttcacggtatcgacacacactaagtgcccaattaggactccattacaaccataatttcaccattgttgtatctctagaataacaataacaaaaatcatagcaactaagcagcaatttaatttagtaaaaagcaaatcatttttcactacgcttttgctcatccgtcttatttattctcctttcagttctgactgttgcaggctaagtggaggtgtgtttacaggatgcgaaattatttttttaaaaatatagaaaacagccaactcttttaattggcaacataaacactgaaaacatggcagcttcgctggatacttatttttatgaaaagagatcaagaaaagataaccatgtctttgctgaacctatcttgaatgggatggcctctaatgacattcatttcagaaacttaagttcttagagtagtcaatcagaaaatcttcagatcactttgtgaagtcttcacagaaattgaaactactatttaggactcactactctatgattcatgctgataatggtttagagcttattctcctaagaaaagactctctgacctatgacagaattctctgagatggaagttgttctatctacaaaatgtgctgcagaattgaaacaaaacaggtctctgtttttccttgcttaataccaggaggtggtacatgcatggaaggtatgggaactctccttagccagatagtaaaggatgaagttattacaggcatagaattgacggggcactatgctgatcacatatctacaacactacgttcagttctgattgtcacatttgttttagaagacacacctacaggagttcatcccgtggagagtcactataatgttctgggggtttaaatgcctgctgtaagaggaacactgaaagcaaaactaagtaacacaaagaaaagggtctggagaatttcatctctaaaatatctcaagcttgttattgtcagagcaatgtgtttgttctaggtgtacctagttgtaggttaagggtaagtaggtagaattatgaaggaagaaacttgcatcagtctaaggcaggtatttcctatctcacagttgcccaagaacatgttgggctgattcaagaagtgagccccaccaatgcgggtgctcaaatacagtttgcaagtacataccaatggagaagaggggattcagacacttctttaggatctttaagttcttttccatttcttaactttggtgagcctataaaagccactcactcctccccatctccaacctaggggtgaagttttgtggttagatatgtcaaagaaagtatttgcttggctaactttaaggccactgatacagaaaaatgatatattaatcagtagataaatggcaaaaaaatagataactaagaggagagctaaggatttcagcatcttggggaactggtgttattagctcagaatccaggaatggcctgtggacatcacaggccatctacaatttcttcaactcttagagacttttccttccatgatctcctctgtctctagttccagggtccacaccatctctgcttttgacctctcaaagcccggatacaaaacttggcaaagttttgccttcccccaaagaaatccactgtcccaaagagaactggtgatcaatgtagactttactaaaagatgaggagatgagagttagggggacttttctccacaagtccttctctggccaccccaccataggctgtcactgacccatgcagtcactagttgcctcctttctcttttcttcttgattttcccctaggaattcaaacttttctttggtttttatgcaaaaccactttcccttattgggtaactgacagtagctaattcccagaacaatacagggtggtgagtcagggctgggaactggacccacctcctattctattgatcaaaacacttataaaagcattccttcccaataaagataattttctacttattagaagggctcatgagtaaatactttggcctcctgctgcatattagtgtgtgggtaagagtcagtgtatgtgtgtgtgttggagagctttactaagattcttaatgaagtgtgacactatttgcaaaagatcaaggggagacattattaactgaacctgaactggcagctactgagatgtgaggagatttattttgtaggtaagcaataatctcttaataaaattgggaataatgcctgggtgaattgggcaggctgcagatatgaaaggagagtaaaattaaaatgtcaaaggaacattgaatggaaggaaacaagcatggaggtgggaggacttggagaagaatgaagatatacaaacccaggactttgaagatggaaagaaatctgaaactccaaagtgaacatgctgtattggccattcaataaatgaatgttgctttttgcttttggaaaaaactttaacacaccgaaggatctagaggagaaaccaagatggtagagagtttggaaacctggccctggcagggagatggacacctggaggatgtggggcttgaagaagcttgggagagtgatggtcactgaatccagagcagaagaggtgatcacataaaggaggatgaagaactgtctgagattcccagaagcagtaacaagaaagagaggcctcaaattcaacatctaaaggggctgggccaacaatgaagatgataaggtggaccaggtgaagatgacccagagtgtgttgagtgtggccatatggcttgctcagactccaacaaaaatcaggcagcagctgctcaagtccttcccgtttttctttttgggaaaccagccccatgtttaaagatctgattttttgagaggagccagataagtaaaatctctacttctgaggctaataattaattttaagcattaaaactttagtcaaaaaacaaaatattttcaagggccacaagcatctactatacaagtttgatagagactgcagaacaaaaaaaccagattgatgctcaaaattaaggcctgatttttaattatttgagctgtccaaaaatggatatggttttactagaatagtggaagaggcgtgagctcccctctcaatcacaaaggtaccagacaaaaaatgatggcaggggccgggagcagtggctcacgcctgtaattccagcactttgggaggccgaagcaggcggatcaccagatcaggagattgagaccatcctggctaacacggtgaaaccccgtctctattaaaaatacaaaaaattagcagggtgtggtggtgggcacctgaagtcccagctactcgggaggctgaggcagaagaatggcatgaatccaggaggcggagcttgcagtgagccgagattacaccactgcactctagcctgggcgacagagcgagactccatctcaaaaaaaaaaaaaaaaaaaaattgttggcaggttggatggaggcttcagaggattgactgtgtattagatgtctctttagctacgctaaccccagcaacttgggaggcagaggttggcagatcacttgagcccaggagtttgataccagcctaggcaatgtaacaaaaccccatttctataaaaaatacaaaaattattaggttgatgcaaaagttattgtgatttttgccattaatgacaaaaaccacaattaattttgcaccaaccaaatacctgggtatggtggcacatgcctgtagtcccagctacttgggaggggctcaggtggcaggatcacctaagcctgagtagatcgaggacatagtgaagcatgatcacaccactgcactctagcctgggtaacagagggagaccctatctcaaaaacaaaataaaggctggttgtggtggctcatgcctgtaatcccagaactttgggaggctgaggcaggcagatcacctgaggtcaggagttcaagaccagcctggccaacatggtgaaaccccatctctactaaaaatataaaaactatccaggcatgttggtgggtgcctgtaatcccagctactcaggaggctgagacaggggaattgcttaaacctgcgagggaaaggttgtagtgagccgagattgtgccactgcaccccagcctgggcgacagtgagagtctgtctcaaacaaacaaacaaaacaaaacaaacaaaaactctctttaaaataaaaattcttgggccattcttggggaaccaactcgatagttatgtagtgggctcaatcatgagtattttatattttatagaagcacttcaggtggttctgatgggaagacaacaggggaacatgttctatttgatgaacaccaaggttctatctttcctaagatttctcagacatggagtagagacaagactcaaggaactggagctggataattggaagaattgatctgacatgccccagacaagtttagattccccagttacatgcttccattacattctacatttttgtaacatgcatcgcactatacaattttttatgatttgggtaaatgtgacagctattgtggaattattttttcagtgtctatgtcctttgcttgaatgtaagctctctaagaactggaactgtcttgatcctgtgcaccagcatgacccactgttaccatcagcctggaatctccctccttccttcgacatctatgtggcttgttccccctttaattcaggtctctgcttgaatgtcctctcttcagagatgcattctgtattagtccattttcacattgctataaagaactacctgagactgggtaacttataaagaaaagagctttatttgactcacagttcctcatggctggggaggcctcaggaatcttacaaccatggtagatggcaaagaggcaaggtacatcttacatcttatatggcagcaggggagagagagcaagcaagtggggagttgccacacatttttaaaccatcagaccttgtgagaactccctcactgttacgagaatagcatgagggtaatgatccccatgatctctcatctcacctcccaccagatccctccttctacgtgtggggattacaatttgagatgagatttgggtggggacacagagccaaaccatatcacctttcttatccatgcttcttaaaacagtagcctctgttgctctctatccctttatctggcactaactctgctcacggtatttatcactgacattgtgctatatatttatttgcttgttactttaatgtctgtttcttccttagagtgtaagacatatagcataaaaaatttgaatttcctgttctctcacctctgaacctagaaagcaatgtggtacacccgagacaccaaatggcatgtatggattaataaatgtgtgaagacagagccatgacaggatccagcaagtccatggagtagagatgactccagtttgcacggggcctgggaagtgtggctgtgtgcagaaaagtgcaaaaaagtgtggagacataacaccagagagcttgtattgggtcagattatgatttggctgttaagccaaggtaaagagattggacattccttgaggcgctaggaagccaggaacagcttgattgatcttgagtctttggaaagattattctggaaaacaagacgagggttcttagcatatgtctttggcgaagttatcatcccatgaattagtaaacaggcctctgaatgctaggaaatgggattcaacatttttcttagaggagacgacagtttttgtttggtattttctagcactatgaaggcccattgtcttagtcctttcatgttgcaatatcaaaatacccaagagtagataatttgtaaaaagtagatatttatttctcattgttctggagactgagaagtgaaaatttaaggtgctggcaggttcagtgtctggtgagggcctgttctccacttccagggtggtgtcctattatgttgctgcatcctctggtaagataaatgctgtgacctcacaaggcagaatggattaacaggcaaaagggcctagctagctccttgcagcccttacataatgcactgatctcattcttcgggtggagctcttgtggctcaatcaccttctaaaagccccatctcaatactgctgcattgaggattaagtttcaacaaaaattttggaggaaacacagacataaaaaccatagcgcccatgatgctgccttagttatgttgaaagtaaagtccctttcagaggaatttgagagcagttaccaagttacacccctcatataacttgacccaaaatatagaagcactgaggctggcttggaagtcactctaggtccaaagttatctagacagatgggccaaatccagtttgatgaatttgaacaaggtgaaaaatgaagccctgcaatagcctttgtcagctccacctgtctttaaactgcatgcaaacaagacagagaggcttctgaggttgtctaggggctgaagacgtagccctgttggttggttatgtctgtgtgcgcctgccccagttctattcctgaccctctgcctttagagggctcaatctccctcagctctgagccctaaggagacaggatgggtagggtctgggagtcatttggctgcccccacatctaggaaccaggatccctaaggtaagtccctggtgccaggcctccttcaatccctgctatgagtctttttcactaagctctgccaagggtcccaccatgcacatggtctctgtctggcctgaaactctacccagacagcattctaatctctaatgtgtctgctcctttgcctcaacccactatgcacctaactccacccaaaatcctgtatcagcctggatagagacccttgttcacatgttccagagaagtacagtgattttacatcctgcttcctctccttctctgcttgaaatgccatacaaggtgacaccagctgatgtccaagggctgagggcagagaacttgaagtcaagaaaggttaatattaaaggagtagcaggaatatgggtaggaacactaatggtaacaccaattacatcgcttcatgtctctgcacacacagagccatttcctcattgtcccaagaggcaggaaagtcaagtctcaatgttaatattttaaatcaacagagactgacagagactgacagagactgaggcttctccaagactcagtcttgttaaagtgacttgttcaaggccaccagtcagctattaagtaaagacaagattccatattccctaactccaaagcagtgctactgttgtttttcattacattgctgactctatgggccctagatctctttgaggggttggaaagttcttctttttttcccctttatgtgtcttagagttgaagccccaactttaaaacgcagctatgtgaattattacctgagtgaatcactttacctcattgagcctgtttccttctccctaaaataaaattgattaacaactatctcatagggctgtgcagataagacaaaattctgtagatcaaaaagctttgttaccagaacacattaaataggtgggtgatgatatttttggggcaaggatacccaaaccttaccttttgtcattaccacctgtgaaaagtcatatatatgggcagggggatgggggtggtatcctggccacattgcaccataaagagaattgagtgtcaactcatagacacagcttggtactgcgccagtagaatttcttcctgtgaagtaagtactaaagagaaggtagccaggcaagacacagagacagagaagattgaccaagagagagaaagagatgcacagagagcggaatcacctaaggttacaaccaacctcgaggggaaaggacaattttgatgatggaatcatagaatgtaggagctataagagtaaaaggtgaagatggaatagctagccttccctccaggctgacagagtaagtatagacacaagcgtccccccatagtcaaatatggatgagctgttagttttgtccattgataaaatggagataatagtggtagctagcattgttgtgaggcttgaacaagtaaaaacatgtaatgcacacagtaaacactcaaatagcatgagctgttattatcactattttaaacttagtttatttcatgaactaacatagactgatttgcagtggtcatctagacaagggttttgaagcctgtcttggctcagcaggaaagtgtcctgatgagttcctgatgtacatcatgggctttgggtagaggaggggatggcacctgtgcctgatgctgaccaatactccaaagccccgattcctcttattgatgagataacggaagttagaggtagatagtgattcctaaagtcaaacacaaaaagacaaatatggaaataaaactcatacctctcttccagtccagatatctaagtctgctgttgctccctgaagctccccagccaacagggcaactggaggaaaatgggaacaggaagaacaagtccagtggattccagaatttcattccagaagatgggggacttctctgctcaggtttggatcataatcctgaaagtcataatcacaaatgccataatcctgaatgttgagatcctgaaagatcaaaatccctagtctaaatccctaaattctaaaatccctaatgtctaatagacataatgacatctttggaattaggtgctataaaggcttctaaaagtaaacttcaaggacttaccaataaagtttgtttttttttccattcaccccaatgcatttggtggacaattccaacgagtggattagctgcatgatacgacaaccatgaaaactttagtttaataatgcatcgtttgtctgcattggcattccttccagctgatgaagttccaggagcttttaatgaattaaaacggcatttgtctgaagaagccagtgaagttaccgactggtttgaaaataattatgtgcacagtaggataagaagacacttacacaacagtgttgctgttcaatcagcagcattgttttcactgaatctgctgtctgtatatgagtgcatgtaaaatgaatttccttgtatccaaaacaacacagaagcatgacacagaagatggaaaattttaatagagaatgcttatgtcaatatatatctaatcatagaataatttcacaaagagcagcgccatgtagaaaacaaatgtgaaagtattagagccataccctaaaagaaaaaaagcagctattcattatgatgcaagacttccaaatacagccaggcgcagtggctcacgcctgtaatcccagcactttgggaggccgaggtgggtggatcacgaggtcaggagatcgagaccatcctggctaagacggtgaaaccccatctccactaaaaatacaaaaaaattagccgggtgtggtatcgggtgcctatagtcccagctactagggaggctgaggcaggagaatggtgtgaactcaggaggtggagcttgcagtgagccgagatcgtgtcactgcactccagcctgggcaacagagctagactccatatcaaaaaaaaaaaaaaagacttctaaatatagttaataatcaggaaaattggagagctcttatggaagacctctgtgcaatcgtccataatttactcctgtaatacatcttttgtatgtcaatttttaaattgtttcttatttttaagttattccctcactattttaaattgtcagcattattatttacaatttgctatgatatgtattccatcttcacatcattttcaataccggggatataaattctaatttgttttatgcattttttttttttttgcaaatttgactccacaaaagtgcactgtcacaatgtagactttgtgtgtaattgttgtgaatgtgtatacaatattgaaacttcctcaataagcgagaggatatccttcatatacatctgcatttgcgaaaaagaaaaaaagttctcgagatctcagctctttgggtgactgcacatgcaggggtgacccatcatggttttttatctcatccaaagactcaagttgtccgtcatgttatgtcagatgactgcagttatataagctgttcctttatgaatacagttcatctactcataattgttacacttgtgtgactgttgttagtatatttgagtgtttatccttgcaaaaatatgtgtcactattgcctattttatcatgtaacgtggcctatgaaatgtccagtcatgtttttatatatttcttaaatcaatcccttttaaaaaatgtaaataaatatcttttaaataatttttaattattttttcctaattatgttttcaggattttgatcttttgggatttaaacttttgcgattgtatcttttgcaattgtgatcctttctcttctgttcaacgcaagctcctgctgttggttgattatagcagattctccaagaaccaccagaaactgttgtggtaccacagaggataccttggaattattcatgcctccttatcttatggacttcctgacaaattgcttatttgctctgtggtttgagaacattttattttgctgcaggggttcttgcttaccttggaagccctaagaagctctgatgagctggaaatgaacagccaattccactgtgctcattgagcacctgctgctgctggagagggcaccaggcatgtccaaaactctcctctcatttaaacctcatcttataaaacatcctggaggtggagatctttcttcctttaagtacattaaggcttgaagaagttatgaaacttgcccaaggtcacacagttaatcaacagcagcatcaggaatcaaatccagatttgtccatctcctaagactgaactggaactctttttattgcaaaaaactcaaatcctttttgaaaaaagaataaggtccaggccccagaggaatagagttattgaaaattcacaatgtgctggatttatatgcattgttatcacatttatatgcattgtttcattttatgtttaaaacaatcctactcctgccaggctttttcactgccaagttagagataaagtagcagagtctagaagtgtctaaaagaggtcaagtatcttgcatgaggttgcaccagctgaaagttctggagtcaggagacgtggactaaagtcctgatacgtgcctgttgtaccaacacaattatcagtagtgctttttttcactgtccaaagggttctggttgagatgatgaactatatagtcaccctaactaccattctagttcctgccacctggatgccttctgatgcctgaatctccaacatctccttcaattacttcaattactcctacctttccagtaagttattttttttgctcaagttaattaagtctgtgttttgcttgcagtcataacaaaaatttgaatgtgcccactgaaaatattcaccaataggatcttttttttttttttttttcagaagaggtctttaataatcaggtggctagggggttctactgataacattcagcctcctttccatataattcccatgcttgctcaaagggtttatggaaaagtgttcatagtagcatggactgaggctcttcttgtaagcatgacttcccctcacctgggttgacacagttactgccattgtcctgtgagtactgttacagaaacagcaaccagccctgaggccttttatggtgcttaattcagtgagagaatcagccagcctacctggaggcagactgattaaaatgtcattcattttggtgaggtaggaatttgctctcactgaaattgacacctaacctagatttatgtgactgaatatacttttccagtctctgatgcttagccgatgtatggatttaccaaatgccttacacgctgctttttttttttttttttttttttttttttttttaccaaggaacagttgccattgcaatgaagttaggcaatggaaggatgcccatagtattcactaccccaaagagaacacatggccttatggaggggtgcagggcctattgagggctcagccttggacttagcatagaattagcaaagagacaacatctcagaatggaactgtatttggaaacaaggtctttaaagaggtaattaagttaaaataaggtcattagggtggatcctaatccagtattacccatgtctttataaaatgagaaaattaggacagacacacacagatgaaagaccctgtggagacacggagaagatggccatttataagccaagaaaataaagaggcttcagaagaaaccagccctgttgacaccttgatcttgggcttcttgtctccagaattgtgagaaaataaatttctgttgtttaagccacccagcctgtagtactttgtcatggcagccctagcaaactaatgcaccttcatttattccttcttcaatgctcttcctttacatagatcctgctttctggatgatatcacttttcttctctctaaagtgctatttttaaactttttgtgtgtgtgtgcaaagtagccctattgataacaaattccctcaatttttgttttctggtctgggaatgtctttatttccctcttacttttgaaggataattttgcttaatatagaattcgaggtatgttattttctgtcatcactttaagcatttaaccccaccctcttcttgcttgcatgttttctgaagatgagactgatataatgctcctccttgctcatctaaaggtgagatggaattatttaccctctggcttcctttaagatttctactttgtctttgattttctacagtttaaatatgatatgcctagatgtaaatcttttactacgtatcctgtttggtgttctctgatattcctgcatctgtggtttagtggttgtctttaattttggaaaacactcagccattattacctcaaatatttcttcttttctgctgtgtttcctccctctggtattcccattatgtatatgttacactttctaaatggtcccagagctcttagacattctgttctgttttgtttttaccctcttttatctttcctcttcaggttttgaagtttcagttaacatattttcaaggtcactgattctttccttggctgtgcacagtctactaatgagcccattgagatattcttcatttctgttacagtgttttttttgtgtgtgcatgtatttgtgactggatcttgctctgttgcccatgctgaagtgtggtggcatgatccaagctcactgcagccttgacctcccaagctcaagcaatccttctgcctcagcctcctgagtagctaggactacaggcatgtgccatcacaccccgatactttttaacatttttatagagattgagttccaccatgttgcccaggctggtctccaacccctgagctcaagtgatcttctcacctcagcctcccaaagtgctaggattacaggtgtgagccaccgtgcctagcctctgtcacagtgtttttcatttctagcaattttttttttgagtcttagagtttccatctctctgctaacattacccattttttatgtcatgttgtctactttttacataagagtccttatcctattaatcatatttgttttacattccgcgtttaataattcaaaaatctctgctgtatttcagtctggttctgatacttgctttgtctcttcaattgtgtttttgactttcagtaatgcttacaatttttttctgtcaaacgtgggacatgaggtatgtggtagaaggagcttaagtagatatggctttagtgtgaggttgtatgaacacatggctaaaagttaggctgtctgctgtttgttgtacctgtggtgtcataagctaaaatttcctctaacgtatctactgtttctgtcttaatctgctgtcattgagtgtccttagaaaatccttctaaaataatgtctgaggcttacagttttcttagctgtaacttctgttattatacaggcaccctactcattcaagggatggtaaggaatgaggggagggaaaatgttctctattcctttgattatgtctcggtcgcttttacgtagccagtgttcctaggctatgacctttgcaagtgtttcccagctttccctttcgtccctgcttaggtgagacataaaggttaatggagtctggacttggatgtttcccttctcccaggccggttagatgctggtaaaatagattctcctgagatgctttaataaggagaacagagagctttgggcataattcaaaatgtctacttttcttctcctctactggaagcgtgaagggggtgtttcccaaaattcatcctgagaacttgtagggtcctttttgtaggtaaagccatgaaagtttgggtctttctgaagactgtcccctccccaaagttattaactctcaaagtagtccacatggagcctccagaaatttttcaattataattgagtgtttctactggtattggttccagctgtggacctctgccctccataagctgtgattctctgtactcatctctctgctactccaggtttaggggcagaagttcgcccagtgacctcagttctctgaaggatctaagaagagttgttgatatttttagtttatttggtttttatttagttgtgaggatggaagtgacaacttccaagctgttcatatgtcagaccaaaaactgaagttgcatcagtgtgtccattatagtacttttaagtaagtgaatcaaaatttctttctgaatttgagttgtgaaagtagagattacctacaaatgaagtgttttcacaagctcagagtcaaagcaggctacttggctaatgaatgcagcacagaaggaaaggagatgactctggacttagagttgggaaaaaatgggttgagattccagctctgccatgtcttttgaggtgacccaacttctttgagcctgactttctaaatttgtgaaatagagaaaaaagggatagtttgcagaaaaccttacaattaatcatacccttcctctgtgatggatttttaatcaatagagaaaaaaaatgagtctcacgataataaaatatgatagctatgttatcaccagttgaccagttccattaacacaggactcctgtaggcttgagagtgcgcaaagggaacagaaatgtttttctaaaactgtttatctctggtaaatccagaaggaacccccttccctcaacctctatagaaataaaaggaacaaaataaagagcaccctgccctcaaaatctacatttcaccattattgtgaatatcaaataaggcaaaataaggaatagtaattgatatggtttggctgtgtccccacctacatctcatcttgaattgtagctgtcataattcccacgtgttgtgagagagacccggtgggaggtaatagaatcacaggggtgagtctttcctgtgctgttctcatgagaatgaataagtctcatgaaatctgaaggtttttataaaggggagtcctcctgcacatgatctctcttgcctgctgccatgtatgatgtgactttgcacctcattagccttctgccatgattgtgaggcctcctcagccatgtggaactgaatcagttaaacctctttcctttataaattacccagtctcaggtatgtgtttattagcagcgtgagtacacactaatacagtaatgataatgactggcaatgctttctgattagttacttgctctggtccacgcattgtgctaagtgctttatgtgctgttctctaaacaaccctattagaattacattcttactactccctttgtatagaaaactgaaacctatgaggattcaataatccacccaggtcactcatccatcatatgacttagttcacattcagtttttaggtgttatctaggtgaaaagaatctttagaatcctgaggaaaaagattaaaatcccccaggagagacaggagctagcacagagcctgacacatgaaaggcacttcatatgttttggtggaagttaaggcaggtgttcagaaatcactgcctgcttcactcactgcgtttaaatgtgtacagttgcacacttcacaactagacagtgtacaccctgcagggatggaataattatttttaaaaattttaattgacatataatgattatacatatttatgaggtacagagtgattttccatacatggatacaatgtgtaattttatataagtagcatatctatcacctcaaatatttatcatttctttgtttggggaacattctaaatcctttctactacctatttgaaattctctctagtaactatttgaaaatatatattattgttaactgtgttcaccctcagtgcactagaactgattcctcccatctagctgtaattctgtgtttgttaaccaacatctccgtatcctcccactcctgcaaacctactcttctcattctccagcaaccactgttctactttctacttttaggagatcaaagagagtgagacagtggtaactagatgcaggaagggtaggagggaggagggataggaagatgttgggacagctagtttacttcactaaacctacttgctataggactgagttctttgcagtacttggtacatataagatttattgataaatgcctttcaacctttagtaattaaatgttttggaggggaagaaagaataaattagtcaagtgtgtatgataaccaagatatgaaaacaacccaagtgcctattgatgcatgaatggataaagaaaatgtggtacacacacacacatacacaatgggatattattcagccttataaaagaaggaaatcttgccatttgcaacaacatggatgaacctaggggacattatgctatgtgaaataagcctgaaacagaaagacaaatatcacatcatttcacttataggtggaatctaaagaagttgaactcacagaaacaagtagaaaggtagttccaggggttagggggtgagggaaatggggagatttgggtaaaatggtacaaactttcagttacaagatgaataagttgtggacatccaatgtacagcatagtgattacagtcaataacagcatatcatacacttaagatttacaaagagaatagatcttaaatgttctcattatcaaaaaaaagataatcatgtaaggtgatatgttgattagcttaattgtggtaatgatttcacaatgcacatgtatattaaaacatcatattttataccttgaatatacacaacattcatttgcaaattatgtctcagtaaagctgaggggaaggtaatgcatgtgtgtgcatctgcacgtgtgtatgaatgtattttccttaggcagttgggtggagtaatgggaagacagagatggggaaggattagcattcattaagaaacctcctgtgttaagagctgtgtgcatgtttttctctggtggccttttagggagtaggaaatgtgacatgactagatactgcctggcccccagcaatccacaagtattagtagagcaccttctatataatgggaactgttctggggaaaccaatctaagaaagcccctgttctcacagggcaccagagagagtaaatcgattggaacacagtgatataagctgtaagtattactatgtggggaagacaatgtgctttggtggcacatgagaggactatgaactgggggctaaagaggagtcttcccagagaaggtgatgtctcagctgagacatctaacaagtgaggaggtagaggcagcagaatgtacgaggcccaaatcactgatgtcagttattaatgttattgttatcccacttgctgttatgggcttgagaatcagtaaaatcctggttttgccatctctgaatgtgtgaccttgggtaagccacctgatcttcctgagcctctgtcttgctctctgcatcacaacgacaccctacataacttgtaatagtgaaatgaaaagaaaaagagttggcagatgcacagaaccaactctcttcctggcatttaaaagtgctacaacatatttctctttctatcctcttcaaagagtttaacatttttttaattttctggattctagagtcttcttggacaccagatcactcccaacaactaacatttgcagagagttacgagaagctgggcaaatatgctatatataataattacatgagtgcaaccaactggcaggccacgcagcaaggtcctcctgagctattatgtaaaggtgcacactattcattccaggaagagtccataaagcaaattcacaagttagtgaaggtctgttataaatcagtaaataaccatgcactgtaattccaggctttttttttttttttttttttttttttttttgagacagagtctcgctgtctcccaggctggagttcagtggtgcaatctcggctcactgcaagctctgcctcctgggttttcgcaattctcctgcctcagcctcccgagtagctgggactacaggcgcccaccaccacgcctggctaattttttgtatttttagtagacatggggtttcaccctgttagccagaatggtctcgatctcctgacctcgtgatctgcctgccttggcctcccaaagtgctgggattacaggcgtgagccactgcgcccggccaattccaggcttttaacactaaatgtgcacagtaactataccttatttgatttttagacttttctttaaagtgcatactttatatccacaagaaaaaaattaaaatattatcggtttcatacttcaaagatggctggggatagataaaccctatccaagtttgaatctaggcttctcctcaaactgcctttgggtcgatgagtacattgtagtatgcttgacacaaaatcagtatctgtcatacactcttaggcaaatgataattttctactgaaaactatttccttagtgatagtaaatctccaactactgttgacagatccaatttttgcaaagtgccaaaaagcctaaaacatgtagggaagaataattcagcttcacaggtattattgagcagcttgcttgtttgctctcagatttgcccctctcccattctttttcttgcaaacaggttctctatgtttgactttatgagtcaagttcagccaaagggaagtctgttaggagataggagaataggaagtgtgtaattgacattgttagtgcctcactcagattcctagggtcccttttcagttcagcgtgcctatcccccagcttctgaaggctcacacttgtgatcttccctgaggaattggtctttagtggctggagccatgtcaccagaggtgttttgaggttacacaacccccttggaatcatatctcatcattgacttgtgtgcaatggacaaaagcccatctcccttgcctcaaggcaggacaaacactggaatgcaatttttacccccaaagcttcctgcaggatctggctataattagatgtcacctagaagcctatccttgcttacattctttccttttttcatccttgcttccctggccattcagatttctcctgggagcctgtgttagtaaatgacttacacgcaattccctgtttcaggctctgcttccaggacaccagcctaggtcaaggagagaagccaaggtatgtcttcccttttcactctacctctggtggagtctgatgcagaagttcagactccttcattattcctgctcttgccctggtagcttgcactggttctggctccctcctggtcattctagatcctatgagatggctctgttctttatgttttcagctgccttctggagtttgtctctggccccatgtgcccaacattttggctggatccttgggaggcctctcctccaaggttctgaatctcttgggcaatgccagctcctggactttgatagcattgtcatgctccttggcccgtcagttctaggggtggcagcagcctcctagagttgttcatctctgggttgccttaccttctcctggtttctgcttttccaacacctctgtaattaggccctcccattaaattccttctattgagctccatggtatggatggtcctctgtgttccttgacttgtcccctggaatccttgtcttgtgctacaccattgttttcagtcttccttgcaattaggtcagctaccgactagtttgggccaatgcaatgtgcgtagaacccgtaaaacctctaaacaatcctctgcaccctctcctcattcatctgctgacagatgcctgaagtctgatggaagattttgagaacctggggcatggctgatccccagacacaaggagcctgagtagataaagactgtgtagagcagagtctttactcacaccccaccccctgtaatcttcaatggactgtgcatgcatgagaaataatatgtctccaatttgtgatccatataggaaaacaatagaaagcaaaaatcagaagtgtggtatattagtgagctattcctccactaacgctgtgtgattaagcaatccaaaactcaatggcttacaagcacgtttattcctatgctcttggatctgccaccaactgcagttcagcttatgtgggctagtctctctgctggctgatctgctccaggcagcaggcttggcttcaggctgaggttggtttctccacctgtattcattttggggcccaggttgaaggtgtcattgctttccagggattaaacttctcaaggcaaattgctagagttcaggaactcagccaaacatgcaagcacatttaaatagtacctgcatgatgtgctcttatgaaatctgctcactttctgttgtttaagcaagagtcgatggagcaggaaaatataatctaccccacagggagggggagaagaataacaatttgctgaaaaatcatcaaataaaagatatggaactgcacagaattttcactgtcacaactcctggtcttggattttccccaggaatatcactggcctcatcctctctcctgtcctgaagaaatgagttccatgaattccccttctttccagactcagcatttcttatttatttatgtatgtatttaaattatactttaagttttgggatacttgtgcagaatgtgcaggtttgttacataggtatacacatgccatggtggtttgctgcacccattaacctctcatctacattaagtatttctcctaatgctatccctcccctagccccacatcccctgacaggccccagtgtgtgatgtttccctccctgagtccaagtgttctccttgttcagctcccacttatgagtgagaacatgcagtgtttggttttctgttcctgggataatttgctgagaataatggtttccagcttcatccatgtccctgcaaagggactcatccttttttatggctgcatagtattccatggtgtatatgtgccacattttctttatccagtctatcactgatgggcatttgggttggttccaagtctttgctattgtgaatagtgctgcaataaacatacatgtgcatgtgtctttatagtagaatgatttatgatcctttgggtatatatccagtaatgggattgctgggtcaaatggtatttctggttctagatcctgaggaatcgccacattgtgttccacaattctgctaaaatgtaaggtcctcaagggaaagaattctacctccttttgacattcaataagtattaattgaactcttgtcatgtgccaatcctttcactaaacatggttactgagccaaagccgacacgcttcctgttctcatggagctaatgggttagtgggtgaaatagtatttaaattagcacaacggttagactaatggtcaaagctgctgagaagaaaaagtcctggtgttataagaactcatgacaggggagctaatctggttggagatttaagcacagaaaaggctcacctttgctgagattgcaccactgcactccagcctgggtgacagagtgagactgtgtctcaaaaaaaaaaaaaaaaaaagaaaagaaaagaaaagaaaaggctcccctttgaatgtgatgtttgagctgaatttgaagttctaattccccttttgaccatgccaaatacctagaaaaacacttggcacaaagtaagtgctcaaaaatgttggctgaaggaaatagtaataggctattgataaatgttgtagatgagaatatttagatacattgcagtttcagcccttagcacattttatctcatttaacctcacaataataaaatatattctataattataagtctcattttatagataaagaaactgaaacacagagaggttaagtaatttttctaaggtcatacatccaggaagagatggagctggaatttgaacccaagccttctggctccagagttccagcttttagtgactacgttattggataagatcatctcttttccatgcaccagctttgtgctagctattatgcttgcactgtttcataacatacctgggagaggtatgtactattttattttcttttttaatagatactataattggaactgagggatagaaatgcctccaaccaaaatcatgaaggtcacaagtagcactgtcaaaaatagagccaaccttgttctataacctgtacctggatcctttccatattgccaaactgccaactggtgactgagatggtgacactgatggtcaagagactatggaaaacgacaagaagaaaaaggtggggcgcaaggaaagtgcaggcttctgttagaccttctgccttcttcttgggacttgggcttttaaaataatgtagaagctaaagacaatcagcaactcatgaacaccctgaagcaaatttccatttctttatgattctaccttccccatgtcactttgcatttgtaaaaagcattgcaacattgcaatcacttgtaatgctgtctgattagaagctgaatccatttttctgtgcaaatatgaagtttcccattgtatgaaaatgttatagaaaattaagtgtactaaatggcaatttttaaagaaaaattacaaggtgcacctacaggtttgaaatctagtttttttttttttttcaagtggatggaaagaatattgagctattgttacatgttctaaaaggtgggtgagtaggaaaatgactaaagaggggaggtgattgctgaaatctgtgctgactcagctactgagctgaaagatgaaagtagcaagacctaagctgtctctgtggattccaaaccaatcatgttaattggaaactggaacgaggaaatggtcacaatcaacagatttatcacccaaagggctgagcagttcataaatttaatccagcaaaggaattggaaaatagaattgatgcttataaaaatcaggagtggaggtgggggccttttctaaacaacccttagcagccagatggccagcagtgcttgaacatattttatttgaagctattagaaatatgaaaaggcggcttcctcccagcccctggatgaagtattatagcttcttttttatgatccttataaaagaagagcaataaagagacacaaacagggtagttaagtttaatgtcggtaaaaaccagacacctgaatatatgtaatttattttcttaaaatcttgcccaattgaggctgctattaattagtatgaaaatgtattgcagagccaattttgcatgaagtttgttattgtggctactttatgaaaaggaaagacaaatcaaccagaaaagtctctgtgacttcattgtaaaaaggaggtggagggaagtcatcaaaacaacctaaggacttcatctaggaaaacaatcatgtgagatcccagatctcaagaattcaggaggcttcctccaccatggggatgagagggtagggggggcactgggggaggagaaacccacaccagttgaggacctacggtgtccaggaacggggccatgtactttccaggggtcaggcacttgtgactgtctgcatttttcagatgagaaaacaggctcagataagagcctcagccccagtgatagaacttattaagggacaagccaagattcaaacacaggtgagtctattccagactccatatttgactatgattggctatttctcattacaaagtctggattacactacccactgtgttttgtttgcttctaagcagccaaactatttatctggcttattggaacatcagggaggcagaagttggaaatggtcaaattactgtaactcgtctaaagccttcatttacctgtctgtggaatgagtagggctctctccacttactgcttgctttatttgcaccattcatcaccacgggaccaggtggagataagtgagttaataaaacccaattgaacaactacagtttctatggccagctgttgctcaataaatatttaacaaagaacatggtcacagctaaaaaataattcttgaaggtgattggatctaaccatattatatttccttccttttgataaagatatcccttactgagtggcttgattctgtttgtttgtttttcaaagaggggcaaaagcatggctttggctttaccagtatgatggaaggaaaaaagccaggctgttattctgtcgttggaaagagaggttcaggcctcatcttttttgctcatgtgctgtgtaccactgagcaagttactttaccttctcaccctcaggttcgttcttcatatataaaataagagtcataattcaacttggcgttttgtgggtttcaaataagagaacacattggaagtgtttggaactcggccaaatcacattaaatactcagtacgtgccagtccttccctcaggcaccatctcaacttttaggatataataataactactaaagtaccacattgttttatgtacataataaattggcttcatgactttttatttcacctcatcttcactccaaatgtgtgaggttggcaggaaagaagcaggcatccccaccttcatacacagatgagcatattgaggagcagggagataaaattcccgtctgagccacacagcaagtaagagttgccctgggctgttcctaggatccatgccctggagtgccaggtaggctcatttccattgccccacaaacaacatcaactccaccttcccctgttcatgctgacacctcacttacccattcactgccctgcttcctcatgtgcacaatggcaaccgtagctcaaccttgcagagctgattggatagcataagcaatgacctcaacgctgtgtgagtgcggtgctcagtaacaggcaggatgaccaacttattataactccacctagtagcgattgtcctgtggccaataagcatcaatctttgcatttaggcaccaacataaatatcctgtctacaacggtccctatttcatacacgaatgtacacatacagaactgaaagaagacagaaaaaaacaggctcctttggcacatcagtgggaaaatcaatctgaaaatcttctctgctttctcaaattgggaaaatgttaatcaacagcactgaaaattggaggaataatgtaatgcctgctgaggaaagtagacaacacagagctgatgtgtgaccatcattggctattaaactctgatttgctgaatggtgtattcctttagaaagcagactttctcaccaaaataggcaatagaaatgttcccatgattaacaaggtggcaacatgtgaccaataattcacagagtcagcaaacacagctaacagctggcctgaaaacactggggagacaatttatgagcctctgctcaattcacaaggggaggggatgcaagtcctagcataataaccatatttcttacttgctttgtccagataaaatcttactctagattaagaggtggtttccttgttgctcctacatctggattagagaaacataaactcttctgtgattatctctgccatctagtagctgctggagaagaaagaaagcaacaaggtcctgatgctataaatgttgataacattatacaccaactctttcttgatgcacaccagttcaaagggccctggaattcggttgtacattttaaacgattgataatgcaacttcttatcaagctgatcattagataatcactggagctgaattactaagagtataaaaagaaggaaagggaggaattatgtatgtactagaaagaagaaagtgcataaggaagacaagaggagaaagagagggaaagagagaggcaaagattgaaagaattagaaaagaatagaagctgtcagttatttggcatttattatgatccaggcaggttgttgagggcctcacaaacatgttctcatttaatattaaggatcgaactataagttagctactattatttcacggaggagaaaatggactagagaaggttatataacttaaccaaggtcactcagtaagtaattggaagaacaaggattagaacctaggagggaggagagaaggaagaaaaatgagaggaaaagaggaaagttagttttagagaatgactagtacagactgccagctgctttgttagaaaattggtggcttttctatcataggcaaatgggcataaacaaagaggcactttgattgtgccaagcttaactctccgccccagaaagtaaaactccaattagaagtgagactgcgctggaggttcatgcttgctaacagggatggagaacaccaggttgatgggccaattcattagtggggaccactgcccgcaaattcaaaagactggagaaggattgtgcaagctgccacagccctgggccttttttgcatgctagaaagaaaaactccagggagcagggaacatagtatctcaaaataatatttcaacatctatttagttaaaagagctaggaatacatgaaagttctaagtaatcaccctttcctgggctgggagagatgggcactaaacataatcacactggaatcacagtagattattttcagtaaaaataaatagaaatataaggaacaaatgcaatgagattatttaaaaacagctcaggctttctttggcccaatgaagaaaacctctactagaagcaaaagttgaataaaggaccagacacaaatatacccccattatgtatttgtcaaatagtcggggcaggtcactgtgggaggtactggaacacattctctgtcctcaggggtctagtgtccaggttaatgtcgagccaaaattcccacctgggtacttggactcccgaattccaacgattctgcttcctgacagccacccagcctgtcaaccttaacactcagctttgcttcaagcaagtatttgatatttgtcattttggcatctttggctgaagtttcttataaaacagaagagggacatttaaaaatgtattggggaccagatatcgtggcttgcacctgtaatccttgcactttgggaagccaaggcaggaggatcgcttgagccctggagtttgagaccaggctaagcaacaaagaaagatcccatctctaataatataaaacaaacacacaaacaaataaaaatatattgggcatgaatgtgctgatttattcattcagtataagtttatggaaccctggaccctgagacatcagcagtggaccagagagacagatccttgtggtcatgcagagggacacacaaagggatgcagacaaagcctcagggagaggaaaaggaaggacgtgggcatggtcctgagatggagtctaaatgcggcaggtgggttactttagcagaaggtctcaggtcatttctgtgagcaggaaaaatttaatgaacatcaccaggatgagagaaagatgacagaaagcccccacgtctcagcaacagcacggacgaggccctgaggatggaaaggtgactgcctacagctggagccagaggctggggcctgctctctgctcatttcgtctcctttaatccttacatccatttaagtacaacgtcaacttcagggatgacacagagcaagggcagattggagtccaacagctttccgtgattggtagccagggttctttggtaagtggggggaaattacagcccctgctgctctgcctggactcctccattgcctctggacatgaacactgggctgtttcacatcaagcagctcacctcaaagtgctctggccacattaacattgcagtttggaatttagaggcttacgatttctctcctcgattctatcagcctcgccttctgcagccacttagctcaatcccaccctttcactctctaccttctattgtggtcactcatcgccccatggggttctgggcgcctcctctgtctgtccctgagtaccaaacccagtactgttatacagctgatttctagcgcacctttggaaaatcaggaaataaaggagtagaatacacaagtctacttgcccagtccttctgccgcccatggcctggcatatgttcttaggagactgctttctgcaccaagcagagaacgagcactggcaagaaataagcatggcaagaactctttctccatctgggcctttcccagctcctacacacaatccctcgcccccctcctcagaagcacaggctgccatgctaatgaacatgtccccctctgtcagatcaacttccaagaggaatcctgccttcagacagttcactttttcaccttcagagctattccgagctggtagcttatttacttgcacatttggtgagcgggttgatggcgtccctggggactcattcatttgtgcagttaaagggagctgggaaggcagtctcagcacagtcaggtgcagggggcggggctctggggcccagcctgcgtgggtttcatacactgtttgagctcctttgcccaggggttggcaggctggctacttttgtgccattggttccgagtggctcaggaggggacttggggctatggggcttgttgtaggcagaataaaggccccccagcgatgtccacatcttgatgcctaaaactgcaactatttctttacatggcaaaagagatgttgcagatatgattgagatgggtacattattatgcatgattcaagtgggcccaatgtaatcacaagagtctttttatttatttatttatttatttatttatttatttatttattttgagatggagccttgctctgccacccaggctggagtgcaatggtgcgatctcagttcactgcaacctctgcctcccagattcaagcgattctcctgcctcagcctcctgaggagctgggattacaggtgtccaccactgtgcccagctaatttttgtatttttagtagagatggggttttgccatattggccaggctggttttgaactcctgacctcaggtgacctgtccgcctcagcctcccaaagtgctaggattacaggagtgagccactgtgcttggccaagagtccttataagtagactagggaagcagaagagtgaagcagagagattggaagatgatgtgctgctggctttgaaaacagaggaagggggcacaatcaaggaaggcaggcacattccttcaacattgaaagctgggaaagacaaacgggttctctcctgaagcctccagaaggaatccaaccttactgacaccctgattttacacagacccattgtagaccttttatctccagaactgtaagataacaaattttatgttgtcttaaactaagactgtggcaatgtgttacaacagcaatataagctaacacaggagtcttagcgaaaacgtctgagtcctcaaagcaaggtgttcactcattccttggcctgttgctgtgttctctcatttggtgcatacacaaacagtgagagcaactctctgcaaggccatctgtcagaggctggggaaatgatgatatgttgactgcttcccatcgttcagcctttacaggaagctgacagagtgctagcagcaaatggccatgcatgctagcacactggagtgtgtaaggttgcaggtaagcccagcaggggtgcagtagaggggaacttaatttcatcacaaagcattcaggaaggttcctggaagaggtgaaactggagtgaggccttaaaggatgaataagtgccagtcatgtgtgagaggaacaaaggtatccaggcagcaggaacagtgtgtgcaggggcatagaagcatgaaagaccttggatttcttttcttttctttttcttttttttttttctcgagatggagtctcagtcacccaggctggagtgcagtggtgcaatctcggctcactgcagcctccaactcctgggttcaagcaattctgtctcaacctcctgagtagctgggactacaggcgcacaccaccacatctgacttatttatttatttatttttgatggagttgcactctgttgcccaagctggagtgcgagggcatggtctcagctcactgcaatctccacatcccaggttcaagtgattctcctgcctcagcctcctgagtggctgggattacaggcacccaccacacatctggctaatttttgtattttcagtagagacaggatttcaccatgtttttcaggctggtctcgaacccctgacctcaagtgatccgcccacctcagcctcccaaagtgctgagattacaggcgtgaggcactgtgcctgaccgacattggacttcttaaagagcttggtatcccaggatcataggtacagagtgggtaggaaagtgagaatatgaggcttgacaggaagacagggccacatcaaagacagtcttgctcaagcgatgaaggagctgaaatctcctcctctcccactaaagtatttccaaagcggaggcacatggtcacgtttgagaagtctcagaaaaaagtagcccaagtagctcaatgctagcttgaaatggatttgaagtctgtcatatttattcttaaaaaaaaagcaatgggcagggcatggtggctcacgcctgtaatctcagcactttgggaggccgaggcaggcagatcatgaggtcaggagttcgagatcagcctcaccaatatggtgaaaccgcatctctactaaaaatacaaaaagtagctgtgcgtggtggcatgcacctgtaatcccagctactcaggagactgaggcaggagaatcgcttgaacctgggaggtggaggttgcagtgagccaagatggtgtcattgcactccagcctgagtgacagagcaagactccatctaaataacaaacaaacaaacaacaacaaaaaagtacattgagactttttttctcaaaatagctgtttctttaatctaaatttgttttctatcaagctttcctagaaaaaatacacaatccagaacaatttgccttcttttccttaagtttgtataccactctccaacccttgtttcagtttgagaactaccattgatgtgggggttcttgaagggttataagaagatgtcccagtaggagaaagtatgggaaattcaaagtttaacacatgtcccatcagagtcagatgagaacatacagagcagggcacagtgaaaacaaaagcaaaagccacaatgcatcaagcttgaagctgctgttcagactcaggaggggagaagagaccaagagaatgcagaggtgacctacctgccttaactgaacctcaaatcagatgggtctggtgtacacatactgggtgtaatggggtgaatagtaccctcccactccgaattcatgccacctgaaacctcggaatgtgaacttatttggaaatagggtctgtgcagatgttattagttaagatgagtccatactggattagggtgggccctaaatccaatgactagcatccttacacaagcacacagggaggagacctcacgaagatgggggtagagattgcagtgagatggctacacgtcaaggaacatcaagggtttccaggagctaccagaagctacaaagaggcctggaagaattctcccctagaccttttggagggagcacgtccctgttgacatgttaactacagacctctaatctgcaaaattgtgagataataaattcctgatattttaagcagctcagtttgtagtaatttgttatggcagccacaggaaactaatatatcaggcagaggctaggttctggcttctgggaaaagatgttatggtaagattccagttctataataaagactaacagaaatgttgtgattggtgggaattctgttattcaataaatacttactaagctgctgtatgtgttgggctctgggctagcagtggggcattgggagcatgcatggaaaaaaagtaagtaagccataacctgcactggtttaatgcacagcctcattgtattcatttgttctcacattgctataaagaatgacttgagactgggtaatatataaaggaaagaggtgtaattgactttacagttccacacggctggggaggcctcaggaaacttacaatcatggcagaaggcaaaggggaagcaagtcatgtcttcccatagtggcaggagagagtgagcaagtgtgcaagcaagtgggggaagtgtcacagtttaaaccatcagctctcatgagaactcactcacgattatgagaacagcatgcaggaaatcacccccacgatccaatcacctcctaccaggtcgctcccacaacattaattgtggggattacaattcgagatgcgatttgggtggagacacacagctaaaccatatcagctgtggagacttccccagaccaccctcaacagaatccccgactgctgctggaaatgaggtccataagccagcatcatcagcctaagatgaagctggttgggtatgctgcttcttggcccccattccagacctactgaatctgaatcttaggtgtaggatccaagaatctctgttttgcagaaggtctccagctagttctgatgacaactaaggattgaaaacttcaggtctagcagtttaatatggtgaggcaaattggcctgaagagagagcaaatcctaagctgaaggcatttagaccctttcaagaacagccccctcccccactagtgcatgtgattggaccaggggttaggacctgctgagaccataaatgaagccattcgtttacatcagtaagaggaaaaagggatgaagacagagattcctaatggtcagaagcctgtgctctttgtacccaactctgccagtcttagattcctccttcttcccctccaacttgctattcagtttgcaccgagccttgcagctgaatgtacaaagggagagctgcctgaaagctgcagtgggtggtaatggtgttagctagcactagcatcaccagtgttgccatcctcatgtgcaccgagcatctgtcatttctcaagcaccatatgcagtcattttatatacatgatatcattttactaatcctcacacccacaggatggagatgttattgtgttcattttacagataaagagatcaagattgatatagggattaattgcccaaagatccaagcccaataaatgacatagctgtattacacactccatcttcctgcccatacctttccctctatgctgaagagtacaatgacagaatgaaggacttagttccctccaatcctaaaaccaagaagatcagagattctccagttgtgttatgcacaggaatcatcagcgtcaatgttaaatgcagaatctggtttgggagatcaagggtggagtctgagatttcatacttctaacaagctcccaggtgatgccaatggggctgatccctggaccacactatgagtaccaaggaattagataattccacagtggacctcatttctcaactgggcagatatgtagacttgtaacttggtcaataacatagctgaggtcattggatccattacttgtacaaccaggctgataacacagctgctatcagaactgagaaaagcaaaacacattaaaatgaatgagaaactcagatcttcttagtgatttagatgttttcagctcctttcttctccattctcacccagctatagttagtcaatatcttcccctgcagacactcctttagctggtccttgagctgatattgaacaaggtgtgtacaagagattctcaccccaccagcagatggttatcaaaattatagaatttcccttagaccagggctgctggcttttacttgacccaaggcctcttgtgttgtgcccctgcaccagaggccagccacgtgaatatttgcttaggcttttgtgacttcatttccaacttgacactctgtttccttgccactagttcacctgctctctgcacctccaacacagacataggttatccattaggagtcataatgctgccttgcttacagcacgggtccccagctgccctggatcttctgttgctaggctgcatctgttatattcaacttcctacactgaagagtttttctgcttccccaagacactgctactgggaccaaccattccctgaccaaccccataattagctgagtgcactaaactctaggtctaccaatctggacttttcccttctcaccagcaacctaccattcagataatagtcatctttgcagcggagcaccacatgccaatgtataagaaaagaggcctcttcatcctactacggtgactcgaatttttaaaaattagaaaaatccaaacattcattattttaattgacagaaatagctgaaaatcatttttaaacacaaaagtggcaatgcctggtaaaatctcaaggaagttaaattttatttagatttagttgccatgataagtttgtgtgcagtgattaagtttgttgttttctgataagataaggacatctagagtcaacacctctggacatgattgactacattcctttggataaaatatgaatgttgttggtacaaaaagagaaagagaaaaggaaagtcatttttaactgtagataacatatcttatatttgattaatttatgaacaacagcaaatacaataatggaatgaacaaatattgaatggcaaactagaaatcagaatttgccaatctcaggcagttcttacatgatgtgttcacctttgaagtcagtgggttcaagtgttatgtgaacatagccttgcctctgtgattcagccttgtgacaagggagcagagtgaatagatgaagggttaggcctggtatcagaggacttgccttcaagtcttacccatataagctgcatgttcttaacaaaactatgtagcttttcttagtcttgttacctactcctaaaaatgacaataatgacatccccaatctcagtggttattgtgagggcaaaaagattttttggaagagggactccagaccgtgctgccctgagaccttactgagccccatccaaactatcttgagttgaaatcaacccttcctttttcccactgctcaggcataatctcagagaaaccaaagcggggtcctggacatgctggcaggtggcagtgatctgaaaggctcatatagcagaggctcagactgtgcagggtctaaaacacagtcagtataaaatccaccataattaccattttaacacggggaaggcatagctttactctggggtcttaaatgtcagaagccttttgcagcacccttaaaagcagagataagaacaagcatggagagtgagaaaaaatatgagatgaggcagcaccttcttgaccaggagaattgtgcctggacttctataaatatgtgcatgtttatctttttttgcttactttttttggctctccctttatcttttaactcaatttagaatgacctgtttattcataaacttattcaatcaatatgcgcgtacccactattacaagagacagtataataaaatagttaagaatatggactctggccccagaatgcctcagttcaaatcccagctcttttacttaatggctgtgcaatcttaggcaaattacctaactactttaacctcaatatccccatttgtaacatagtcaaaaaatcagtacttagttcgcagggttgttatgaggattcaatgagtgtagggccatatggtggctcatgcctgtaatcccagtgctttgggaggccaaggtgggataattgcttgatgtcaggagttttggaccaacctaggcaacaacgtgagacaccgcctctacaaaaaaaataaaaattatctagccttggtggtgcacctgtatttccagctactcggaaatagaagtacaccatttttctcttggtattgccgtcctggaccaggttcaaacaactgagtgacaggtgcacctgtattcccagctactcaggagggagaaaagaggattgacagttcaaataactgtccttgagattgaaggagactcttctcttctctttcccctctgaatccatcccctgcccggcacaagagatgcccccaacccttagggttgacagatacaattaactcggtgtgcagtatttctgtttcctaaaactagaaaccttacccatccttctattcagggatgggtgttagatttgagtgaggaggcttgccataagtcatatgtttttcctctaccttgtccttgtttttccatgagccattaaatgtcataccttaacaacagatggaatccaggagataagtcgatttccagaaaaggcaagacactgatgggaaattacaaaagttacaggtagccctgtgttgcaatacataaaagcttatgggtgctcatctaaagctaattttggggagtcaagcatattcaaaactccaattttgggaaagtttcctctgcctgagtttgttttctcatctataaaatggagataataatatttgtatggtaaggatgctgcaaagacttgcaaagtagatgatcaatcaatgttttttgaaagaatgaatctttccagtgattctggagtcagctgcatcagagttaataggtgatatggtttggctctgtgtccccactcaaatctcatctcgtactctaatccccatgtgtcaagggaaagagttggtgggaggtgatcatggggatcatggaagcggttttccccatgctgttctggtgataatgagggggttctcacaagatctgagtgtcccctatggcatctgtctctcctgccaccatataggatataccttgcttccccttagccttctaccatgattgtaagattcctgaggcctctccagccatgcaaaattgtgagtcaattaaacctctttccttcataaataacccacctgaggtagtatcttcatagcagtgtgaaaacagactaatacaatggagatactgtgactctgctgaggtggctgtagactaaggaagactttccttcagtcattttcttatgtgaaacattggcatgagctctggaaaggaaaggcaagacacacattgaccacatatcatacactagacactggatggtgcctcatgctatttaatccttccctgtagctatcctgcaagatgggcgatatgaccctgctttacagatgtggaagctgaggcttagggaaggccagctagatgactcccaatcctgtacatgccacctgggctccagaagagcagctagagggcctcccctctgtgctcaagcctagagaggtaatgcgacgcaacccaggtggaccttcaggccccaagtttgtggaagaactgatgcaaatggagaaacaggaagattccactgctaaaccaaagtccctcctctgcacactggtcacctggagcagtctcttttccctacactgtaccatcattaagctcattcaaacaccatctctgtgtagctgcttcacggggtgccttagacctaagcacatgtattttttttatttatcaacatgagatcatgtctcctcatctctaaactgaaggcaaagatcctgctgtgtgttggccccatccaggggccctgagaatccaatgtaaccacagtaatcctgacagctatcactcagatacctctcattaggtgccaggcatgattatgagcacataggataactcataattcacaaaatcttcatatcagcaatgtgataccctgttattagcacattcattttgcagatgaggaaaaccaggtacagagagattaagtaacttgctcaaggtcacacggttgctaaggggaggagtcagtatttgaactcagggagtctctgatcataggctttgtgctctggaggggatgggagggctccctggaagcttacggggttatgggcattctagagtcagatctgacctcactcagcctgactccttccccatgaagaagtctgaccgacagagttttatctcatcattaccagtgcagtcttgctggctcaggtccttggaaatattgctattctatgctatatcctaacattaatactcagttaatgctctactattgaaaatcatgctcaattacttttagcataaaatttcagctgcttcccactgcattggaagctttgaaataggcaattgtctcttacctcctctttcacttctgcccattctccctttagcaagctcatgtgctgggaagtcacctttgttctatgattgcagcttttcccctgtgtggaagagactgtactcactgtactgtctccttgaaatgctcttcgctggctattcagagggcagactccatctcaacctctgggtctggaaacttcccttccacctccccaatacctgaagttctctgctccctgccctctctttccctctatctcatcaacccacttattgtctggaccttaactagagttgctaccccaattcacaaattatatcctcagggtttgtagaaacccatctggataaaacttgtatttttttttaaattgtggaaaaatacatacaacataaaaacataaaatttaccatcttatttttaagtgcccaggtcagtagcattacgaacatttacattattgtgcaaccaatctctagaatgttttcctcttgcaacactgaaattccatgcacattaaacaacttcccctttcccctccctccagcccctggcagccactcttctactttttctttctataattttgactactctaggtacctcatataagtggggtcatagagcatttgtccttttatgtccggcttatttcacttagcataatgtcctcgtggttcatccatgtcatagcatgtgccagaatttcctttctttttaaggctgagtaataccccattgtgcatatacaccacattttctttctccattcattccatcaatggacacttgggatgcttctactttttggtgactgtgaataatgctgctaagagcatagctgtacacaaacccctgcattttaaactcctgtatttactgtttgggctgtagacttccagggctgagctccacacactggactgtttctagctccctgacattatcaggctcctcctcttccccttaccgccataatccacagctgtgccttctccatgcctctgggagctattaattaggacaattttctcttcttagtttttaggatattcattttgactcaactcatcacgtatataagtagggtggatgactgagtctacagtgtggtttctgataacttggtggggacattattataaaccccatacaatctctttaaaatgtcctcttcccctgctagatggtactttaaatactcattgcaatgaacagacttccttaccacaaggggcacttagtggggaactgagacctgttaaccgaggggacattatgacctaatgataccaaggagtcagtgatgctcagtgaacgagtgctcaaaaaaggttctcgaagacagtaaacaggagcggaagaggaacaggaggcagcagaagaaaggcctcaagagaaatgtaggagactgcagacactagatctggacattgttggagctgggactacatctccaggaggagaagcatggacccatctaactgaccttatgagaggtgggatcctaggagccagctctagggatgggggctgtgtaggaagcagatgctagatccaggtcaagagattcctcccttgactgcttagctgcttatggttttatgaacgtggacaagttaatattcctacacggctactttctcttgaggagaacaaaccagaataataatatgtatcttacagtgttttgttgattaaaaacgaattcacatgagtgggctgaggagcatggctgtgtctctgcagatgttccataaaaattgttcatcctggttgggtgcggtgactcatgcctgtaatctcagcactttgggaggccgaagtgggcggatcatgaggtcaggagatcgagaccaccctagccaacatggtgaaaccccatccctactaaaaatacaaaaattagctaggcatggtggtgcgcacctgtagtccttgctacttggaaggctgaggcaggagaatcgcttgaacccaggaggtggaggttgcagtgagccaaggtcgtgccattgcactccagcctggtgacagagtgacactctgtctcaaaaacaaaaattgttcatcctctcttgttcttgcaaacctcacatcaggcatagttctatgcccagaattatgccttgataaatatttgggtggaagaaaggaaagatagatgatgttttctccccatcagctgccttctcagggaatttggatctccaatttgggagatttacagaacacttcatgaggactggagatgcccagaatgagcctgcactccccagttgagtgtttccagaataaatggaagatgagtggtgttgtacatgggtgaggcaatgtctatcatttgaactaaaaaggacaagtaaacacatagttcacagtataaataaaaccagagacattccctcatcagcaaccttcatattctgaaagaaagcccacaaagcacctgaaagacattcatagaccagctgccatgagacctctctgcaccaagaacctttctttccttactctcttgttactagcttgaaatcaagcttcatgcttgaaactcagctagtagcacccccaccaggacacacagtggtctggagttagattgtaaacactgggccccttatgctggctgggattttcccgggcacattggtggagctttcttctgaaatgtcacacaacgcagctgtgtaccctgaaagaggttttggaatgacagtctggagaatgggtggagtctgcccatgaggagggtcagaaatccctaaactcctaaggagtcaactacttaaaggaacccaacagttctacaaaaccacagagaaatgtcaacatcactggaccagatctacttcccctaaaaaacataaggcttggcttgacaatactgaagaaatcaaataggaaatgcttattttctgctcatgtctaccatgtccttatttgcctttaaaagaaaaataaaagataatttggtctagataattattattatcatccttattgtcaacattgtcatcttcatccttacaaggaattaaaataccatagtgatatatctaggctgaatcttaataactgaggaagaagcaactagatggagaaggcagacaaggactgagggggtgtgggagctgaaaatgtcccaggcagagagtgcagagtgagctaagacatgctgttccaccctaatctctttttggttacttaattttaccccctcttcatctgttattttgtgtttgtccatgtctttcaacctgttcaatccactttctttaatctgtttctgtgttgacactgaactctggactccaacctatttctggttagcaattgctatccttgcaatatgtcacaaattcattctttcattcaatcattcattcaataagaccatatgatatggtttggctctgtgtccccacccaaatctcatctcgaattttgatccccacatgtagagagagggatctgcaatccccacgtgtcaagggagggacctgtaatccccacgtgtcaaggcagggaggttattggatcatggtgggggtttctcccaagctgttctcatgatagtgggtgacttctcacgagatctggggctctccccattttgctttacccttctctctcctgatgaaaataaaacagggctcttccccacttcgctttacctttctctctcatgatgtgttgtgaagaaggtgactgctcccccttctgccatgattgtaagttccccgaggcctccccagttatgaaggactgtgagtcaattaaacctctttccttcataaattacacagttttgggtagtatctttatagcagtgtgaaaacgggctaatacaccgtagtatctgcttacctgtaaggtaagatgtctgttacctgtgtggtaccatgataggtgctgaaggcacatagaagcatgagacctgctccttgtcactatggaaactacaatctagtagtagaggaagcagacatggatcagctaattgtgatttatattagcaactctttcatttgttcactcattaattcatgtattcaacaaatatgcatggagttcctgctatgtgccaggaattgtgctataccctggggatgcaagcttattttctgttcatgcctatcctctcatttgcttttgaaagaaaaaaaaagataatatggtctagataattattgtcatcattaaggtcaacatcgttgaatgagagtttatgaatgagcaaaagggacaccttccctacccttgtggagtttatagtctccatttggagaagctaatgagaccactggtgtcttagaagactccaacaggaggggtcctgggaaaattgggggttgtgaaagaagattttcctgctctgtctattgcccgccttctgtaagcacaaactgttaatttcttgaagacactttggttacccatggcaacgtctaaagcaagcaataaagagctgaggaaagcacatgttcacaccctcatgttgacttttccacatggccttctgagtgtggtgattgggaaaataaaacgagctcctggttaattaggaatgtgttaggacctcatcactagagtgggtgtgttgactttagaagggacctttaaaactttttaaattattccctaaaatttgcaaaatgtgttatttgaatagactacatttttttctaattttagaaggggaaaatagttggatttttaaagtttaataaaatatttcaagtgcttacatgatctgggctcagtcatctctccaacattatcctttcccactactcattttgctttcatttttttgagtagtcttaccatcccctaatagtctgttttctcttttctctgggacattgcatatgttttctttttttctgtctgtggcttcctttcttcctctatctctctctcctctcaaaatgtcttcttatcctgacttctaacatcatttctacttcagataacactaatttacttcttctcttgactataaaacctacaatgagatgatgcctttactatgcttttcatagtctatgacctccccctatcactaacaaatacattgttttcatactttattcaaacatcttcttttcccccctagggtgggaacaccatgacaagagggttgtgactactatgttgagaagtttattcctgagcccagtccagtaattacaaaataaatattagttgaataaatgaataaatcagaaccatcagtaaatataatttatactgagaagaatcacgtcagtcagctattgcaatgtaacaaaccaccccagagcccagtggcatgaaatgggaggcaactttcattctcacactcaaatctctgcaggtggttgtgatgtctttgcttcaagtcatggttcagttggaacagccctgctctacatatctctcattcatctggggccagcataaaaccacctttgcagaattatgacagtaagagcaatctgacatagttgacgccaacttccttctgatccctttgctgtccttcatcattcctgggtgtaggctaagctaactttgggaagaatttagtttatagtttaacttaaaacaaggataataatagtctctccctaaaactaaccttctttttgctcagggatgaaaactacttttgtaagcctaataaaaaccataaaaaataggattatgggaggagcacagactacactacgagacaggcatagtttctataatcccttactgcttaggagtcatgtggccagaggtcaaaagatttgtgacttctccaattgctcccatagacaacatccttattatagaaactaagattggtcttttgaaatatatttaagactgactccactgggactcatgattcataactcaactaaacctgtggccccacctagaggcagacttagcacctgaggcctgttttccatacccctatgatttcatccccaatcaatcagcagcacccattccctagcccactgcccatctaattgtccataaaagccgtagcctctgagccttggagagattgatttgaatgataactccagttctcccacgtgggccaggctcacatcaattaaactctttctctactgcaatgtcacagtttcagtgaattaattttgtctgtgcagcaagcaggaagaactcattggacatagcaagcaagtcacctggggaagaattttctcatggtaataacagaagtacaagaggcagagttcaaccacacaaggggatctcaagcctttgcctgtttcatgtgtattaacattccattatcaaaacaagtcatatggctaaccccacattcatgaatgggaaacatactctgcccacaggaaatctttgagaggactgaatacctgtttgacaataatccaagataccataaccagtcaagatacaaggatcaatctataatctagccaatatttatttcatgaagttgtttctcacataggcaattattaagtagattttactcatactgcactatgctagattgcttgcaaaacccacaattagaaaatgagtcatggaatctgccaccagcagcatgcaagtaagataaaacagatgattattctacaagaaattatgttatacacttaccaaagactacatatcatagagcagatagcaaagattttagagtcaggcagaccagggtttgctgaccatctaattgtgggtagttgtctaaattcctgagtctcctttacctcccctgtaaaatcggtgtgataacagtacctacatctcataacgtggaatcaagataaaatggctcatgctgtgtgctacacctggcacagaaaaaggcctccatacacacctgttctctctctttgcatccttttgccctattatgcccttgtcaagaccaaattacagagcacataatcccatcatttgctaaaaattgtggatgtcattagctgcttggttttctctctatttgggggccaccttgatgtgtggttcattaacatgaaatcttcaaggaatgaggtatgagtttgacttcattttttaaaaaattttagttccaggatacatgcacagaacatcaggtttgttacataggtatacatgtgccatgatggtttgctgcacctatcaacctgccatctaggttttaagccacacattctttaggtatttgtcctaatgctctccctcctcttgcccccaactccctgacaggccctggtgtgtgatgttcccctccctgtgtccatgtgttctctttgttcaactcccacttagaagtgagaacatgtggtgtttggtgttctgttcctgtgttagtttgttgagaatgatggcttccagcttcatccatgtctctgcaaagaacatgaactcattcttttatatggctccatagtattacatggtgtatatgtgtcacattttctttatccagtctatcatcggtgggcatttgggttggttccaagtctttgctattgcaaatagtgctccaataaacatacgtgtgcacgtgtctttataggagaatgatttatattcctttgagtgcataaccagcaatgggattgctgggacaaatggtatttctgcttctagatccttgaggaatggccacgctgttttccacaatagttgaaataatttacactcccatcaacagtgtaaaagcgttcctatttctctacagccttgccagcatctatggtttcctgactttttaataatcgccattctaactggcgtgagatggtatctcattatggttttgatttgcatttctctaatgatcagtgataatgagcttgttttcctatgttttttggacacataaatgtcttcttttcaaaaatgtgtgtcatatcctttgcccacttttcgatggggttgtatttttcctgtaaatttgtttcagttccttgtagattccggatattagaccttgtcacatgggtagattgcaaaaattttctcccattctgtaggttgtctagttcactctgatgatagtttcttttgctgtgcagaagctctttagtttaattagatcccatttgtgaattttggcttttgtcacaattgcttttggtgttttagtcatgaagtctttgcccatgcctatgtcctgaatggtattgcccaggttttcttctagggtttttatggttttgagttttacatttcagtctttaatccatcttgagttaatttttgtataagatgtaaggaaggggtccagtttctgttttctacctatggctaaccagttttcccagcaccatttattaaataggtaatcctttccccattgcttgtttttgtcaggtttgtcaaagatcagatggctgtggaggtgtggtgttatttgtgaggcctctgttctgttccattggtctatatatctgttttggtaccagtaccatgctgttttggttactgtaaccttgcagtatagtttgaactcaggtagcatgatgcctccagctttgttctttttgcttaggattgtcttggttatatgggctcttttttggttccatatgaaatttaaagtagtttttttctaattctgtgaagaaagtcaatggtagcttgttggaaatagcattgaatccatacattactttgggcaatatgtccatttttcatgatattgattcttcctatccatgaggatggaattttttttcatttgtctgtgtcctctcttatttccttgaacagtggtttgtagctctccttgaagaggtccttcatgtcccttgcaagttgtattcctaggtattttattctctttgcagcaattgtaaatgggagacctcatttttttagagcctatcatcttgcacatcttatccagactgcttttcccctaagcacattatcttgcctttaacaactccaaagagcttctaaaacatctctgtttatttatggctttgtgtactcaccctgctttctatccatgggttgcctcactcaccatactcacttctctgtatgtgatactctaatctatatccaaatcagaggtccacatctacatgtcaaattgcttattggatttttctaaatgaggatcaggctggtatctcaaatctgatgtattaaacactaaatgtagagtccattctctgcatctgcacttctccagtgttctttatctcaatgaacagcttcaccatccatctagtcacaaagcttaaaacctcacggttgcctttgacttatcctcttccctcatcatcgtaatccattcaatatttagtctagtcaagatgactttgtctgtggagcaacataaaaccccaacatcaaccagctcaaacagaaagaacatagcaattagtttaggggagagcaggcaccaagcattgggtttcagtaccactttaccccaattttcctggcttctctagctctgccctccccatgtgagcttcactgccacagtgaccacaaactggccatagcaactccaggcatcattgtctataaaataacacccagagcttccatcagcagaattgtctctcttaggagtgaggaccccctccatagacattgcctaatgtatcactggctcaaaggtccattcccaaaccagcaaaaaggatagatgtatcatgcttggtgtggaccacgacatcaattactcttaatcccatttcttgacaataaaatctaatgagcaccacattattttacctcctcaacaccttgaacctcttcctgtccatgttacaacgtcagttaaaacattcagtgcctctcacaggaactataaatttctgccctactggttttcatatctctgaactttctacacctccccaccccaatccttttttgtacattcagcaaatataactttctaatacagttcccattaggtcacttcttagaacactttcatgttttctcataggatagagttcatactatacaactggacatttgactccttcaaaacttgacttgatgcccttttcatcactattttctgctaattttaacagtttatgttgtgcctatatgatttcatagtagcaaggcattatgtattacgctacttttttcttttttgagacagaatcttattctgtcacccaggttggaatgcagtggtgcgatcttggctcactgcaacctctgcttcccactcaagcgatcctcccacctcagcctcctgagtagctgggaacacaggcatggaccaccacatccagctaattttttggtagagacagggttttgctatgttgctgaggctggtttcaaacttctgagatcagacgatccacccaccttggcctctcaaagtgctgggaatacaggcgtgagccaccatgcctggccacagatttttgtttgtttgtttgtttgtatgttttcttttgttttgtttgagacaaggtctatctctgttgcccaggctggagtgcagtggtgtgataatagctcactgcagcctcaacttcccaggctcaagtggtcctcctgcctcagcctcccaagtagctaggactactaggtgtgcaccatcatgtctggataaattttttattttctttttgtgtgtgtgtggagatgagatcttgccatttttcccaggttggtttcgaactcctggcatcaagtaatcctctgcctcagcctcccaaagtgctgggattacgggcatgagccatcacacccagctcatattaaattttttctatgccatatctcaattactctgcacagttctctgtgaggtagatactattgacattgacactttatagaaaaggaagcttagattaaggcaggttaagtaattttcccaaagtcacctagagacttgtacagctgaagtttagaaccagggctgtctgactccaaagcctgtgctcctaaccactaaagcatatcaccttcctcttgcctccacccaaaccctacatacaagtcatcccacagtttttaagtgctttttgaagaagcctggtaaggttttgtcttcctgggtttaataaagttgctatcactgctcagaatgctcacctctatacctctgccttcagtcctacttttatactttctctgacaccaccaactccagtcaaaattatttctcttttccccatgatcccttggcttgactgtcacacaaatccatctcttgcaccagagtctcaactctttatgatagagaccagttctttcgttgctcagttcttcacagcattgtagccctgtggtttatattcatccaaaatagtccaaatattttttgagaatatactctgggcaagacagtgctagttactatgagataaagatatcgaaggcacagttgctatcctcaagaggtatgcattctagtgtggcagggagacatacaaacaaatgatttcaaggatagagaaatgtacagggtccaagttgctatataagcgtatctttgatttaatttcatgaatgcattctgcagacttataacattgcccatgcatcgatccctcaccggtgagctaggagctttgcatgcgtgttttcatgggcattaggcgtgctgttggtgttattcctccactcctgatgattcttccacatggagggaaacctattagaaaaatgcttgtttttttctccatccccatacccagttccccccagggacaaagtgtgatttgacatgattgaaaggagaagtcaggcacatttaggctggcctcatcctcacctcttgtgaaggaccgtgcctgcagaaaatgtgtgttctctattgctttagctatatagggaagctcagtctcatgtcacactgacaatatcacacatcaattgtgtatcatgattctactcactctctgacccagtgcgttttgtgatgttgcaggagccttcttagactgaaagcaaggaagctcagaagtgtggaaaattacaaccaatccaaggtgggatccacggatcaatgttccagctccccctacttcactgaataagtctagggatggggtataacaatgtgtccttttgattattttcctgaaacatgacaacacacacttacattggctttcccttttttctctttcttactctccctgcttcctcactccttctttctggaatacctctcaaataaactacctataaccaagttcttatctcaggctctgctttcaagagaacaaaaagtaagacagacaacacgaggacatggtttataatccatctctcagctctgtagtctcagtattggttccattccaagaggcctttccccaagagcacctgagaaatggtgtgagtcactatgattggtccttgcctatgttgaattgaatcttgtggccagagggttggaacacaccaggtagctgagctgagtcccacgctcagcccagagctggaagttgtgattagcctcaccagtgtcacatgtgcagacagtcggagtatgtttccatggaaaatcagttagattactaaaaggagagagaataaatgtgaggtaggtcaaacaacatacgatcattaagaaaaccaccaaagagtctctccatctatagatagcacaggtgactctgacagcacaaatgagaaaggagcatctttaccaggggaatgatatcattgtctgttaggattggaagtgatttaggaaatgatttcacccaaacttaaattactgtagaagtccagagagagagactaagcccattagcttgaggtggtccagacaacagttggtagttctggattagaaacccaagactccaaccttccagtgcagaaacaaggtccttctgtttacccattccaccctcacagtggctgcttcctccaagagcccagcagctctaaattgcaaagactatagaatcatgctttaaaaacatcacattattataaaaatgatagacttggctagaagacagttctctttctgaatttactaattcaacctattaagtctaatctgtgtctacaaagaaaaatgttgactcttgatttacttagcttacaaggctatatttcttgcgacacacatagtgcctgggacagtccctgactcagctctcagctgccctgctttcatgatgatttagcaaacagcagagaagagagacttgaagggagggagaaaacgatttggctggaagccttcccagcagaggagggtttttctttggttttgaaggacaggccagacatagattggctgagaaggaggggcaacatggggttggagagacagagataagagtgtttggggaaggagcatcttgttttgaagtgagaacaaaggaattgaatttcaatgaataagtaaatcgcagatgattagggtaaagactataatataaatttcaacattcttgacagtgtaaagtgtttcctacagaatgaagctctggagggggaggggaggggaaatggaggaaagagaagttaaatttaatagacactatcaaacagtagaaaaagagtttaagcttattattagagttacacagagaactgacaaaacttaaagcataacaatagtactatcaaatgctgggaagaggatggagtaagaagggagaaaaacaataaatcaaaaaatgcagtttcaagtgtggtatatagagtcatggaggccaacaatagaataaataaaggcagaagtaaagtggaaaaaaggctgtttgtgagcagtggcattaagagtgaggagagggaagtattcacttccaccgtgagcttttctgtactgtttgaaccattaccatgtgcaggcattgctttgaaatctgaaaaggaaatcccacaattcagcagttgccccattagcatgaactgtgtttctattctgtactcagcactgcccttgggttgggaattagaagatgaataaatgaacaaagcattaggtgttagaatggaagagcctttctggttgggagaagtgcaagaagcacattggaaagaattcccaaaaaagtaaaacagaagatggatattgaaaactgaagaagagtccatcaaatgattcagcaagggtactagaggcagatgccgaaataactaaaagaacagaggcatggaatgcagtgaaatcttctagcaaatgcagattgtgcagttttgcttgtgcatttggtgttaaattataagactgcagggacaaatcagctcaaataaggaagggcttatttaccacattaggaggtctgaattgtcttctgcagaccaaggatcacaaactcaaatacatagctcagtcagtcagattctcaaaagtaagaaaagaggagggggaaagatgacagtaaatgaaagagcacatgcttgagctgggcagaaggtgcagctggtgcagcagatttttgccatccacgtgttcaaacccaggatcagagattttctagttttgaaaataaagctaggaatcaagatttttatgtaaaacttcttaattataaaatgttggcaattttattaggctacactatgctgtgttgtgataacaaaaaaaaaccaaaaacaaacaagcaaaaaaaaacaaaaagcaatgctcaatggtgtaacataaaaaggatttatttttcactcacacaaagcccaaatgggtagaacagctctcttccatgtggtacctatgtcagcaggaacccagggtcttcaaggttattgaaacaaaggtggagaagtgcattgccttttaacagtattgacaggcacctgctggctggaatgagttacttgccctcaatctaactttaaagactaggaggtatcatgacacacatgggtatttaataagcactcaactatatctgccatgccaactaatacaaacattttatttttaaataccatatgatcctattaataatggttgggtctggcagaagggtgggcagtttaagaagatctctgccacagtcaaagattggggattctttagaaatatcacattttcatttcacaaaaaataattccagaaaccatgtggaagattgaccagaggggcaatgctaaaggcagaatggttattgaaatggcctggagaagcactattgaggaactgaaatgggaaaggaacagtcggaatagaagagaagaggtgctcgtaagtggtattaactctcttggtttatatccttggtttgtaagaggaggatgtccacaaagtttgtgtgaattgcccaagattgcaaagttaataagcagctgttcagaaacttagtccagcacactttttatcccattggtagaatagtggcaaaaaaaaaaaactaatggaaacataaaatctttgactttgagaattagacttcgaggagcttatctaatgcaaacactcaacgccatcagattttgttcgtaactgattttaaatgtgaacctcctcaaagatattactttcttcttaacttataagacctgccaatgggtaaacatcaaacagataatgtattcattttttaaccttgatttagactctttttctattaccttctgggaaatcctcagcttaagaaagaaatatttttatctttctcacctctaaacatgtcctggtgctggaacagttagcattctaatcagcgtggctcccaaccatctgtgatgagatttctttgggaggattcaactcagtctcttatgctcagaagtagttaatccacttgagcttaaagcagaaagaaaatagagaaaggaaaattgctgggagggagggaatagtagtaaggaatgtagggggtaggggaggatgaattaaatgaaacagtgtgttttttgccctaaaccttcagaaaatgagaacataatgcatccgtgtaagagcacataaaagataatgttaagcaaaaaattttcatattaattacatggaggttttataggaggcactgggctggtcattttacattatcatttcagttaatctgtcctatttccccatgtgatgtgagtgttatccctattttataaatgagaaaagtaagatgcaaaaatgtaccagatcacaagctatcagagaatccctgttatttaaactcaaagcctgagtgctttcttttcaataaccttagtaacagtcttatattagaattcaacaaatatttatcaagtatttatcatgaagcccaaattaggatgcaattcatcttatttcattcttaaaataatcctatgaggtcagtattattattccaaattgttacagcaaagggaattggggtgcaaaacaaagagagttaagtgcctgaggttttattctaggtgtcagtaaagatacaaggcaggaattcaagttcctgaagaactaggtctcttcagattggcctttttttctgctctctttggaaaaaactttctcatactgacatcttttccgatttcttagtcttttatgatctttctctctttgtctagaggacctactgaaagagatatttaggaagaaagtcacttaattattacaaccatttgggaacatatatgttatcagtatttgttcttccaataacaacatagggcatatgttaacagactagccagtacaatgatatccttaagggccattactttcgtgaaaagataaaaagatctaggtgtgaagttggtctgtgaggcatctttgttatgagagtttgagcaaatatctgaaactttatgattctcattaaaaaatgccattgttggaacataatccaaatgagttatacatctggatcatatgttcaagaggtccagcacacaataaaaaatacacattagaaatgcaaagaagaaggaaaatgtgacctatatcaagacataaagttgtcaatagaaacagtcacagaggtgattcagatgatggaacgagtagacaagaactttattgaaattatgttcaagaaaaggatggacatatgagcaaatagatggaggatctcagcagagaaatgaaaactatggaaaagaaccaaatggaagatctggaactgaaaagcacattatcaaaagtaaaaaattcactggatggttataccgaagttttctatttattgtaccaaatactgataagagggtaataaaacctcaattatgaatatatatatattttttacttaattttattgtattttgctttataaagtttgaaactctgttattagacgcacaactgtgatggttaattttatgtgtcaactagactgggccatagggtgcccacatacttagtcaaacagttttctggctacatctgtgacgggatgttttggatgaggtcaacatttgaattgctagactgaatatagctgattgccttctgtaatgtgggtaggcctcatccaattagttgacagcctcaagagaataaagaggctgaccctcccaagggtaacagggaaccctcctgctttgttgtcatgaattgtgatgtaagttattttcccatcttcagactagaactgaaacatccgctcttcctgtgtcttccacccctcagactggaactatacttttggctctcctgggtctccagcttgcaaactgcagatcttgggactcctcagcttttaaaactgcatgagctaattcctttcactcttttttatggcttcataatattccacggtgtatatgtaccgcattttctttattcaatctgtcagtgatgggcatttaggcagattccatgtctttgctattgtgaatagtgctgcaattaacatataggtgcatgtgtctttgtggtagaatgatttctattcctttgagcgtatatcaagtaatgggattggtgggttgaatgatagttctgcttttagctctttgaggaatcaccacactgctttacacaatggttgaactaatttacactcccaccaatagtgtataagcatttcctttcctccacaatcttcccagcatctgttatttttgactttttaatagtagctattctgagtggtgtgagatggtatctcattgtggttttgatttgcatttctctaataatcagtgatattgagcttgtttcatacgcttgttggttgcatgtatgttttcttttgagaagtgtctgttcatgtcctttgcccacttcttaatggtttttttttattgtaaatttgtttaagttccttatagatgctgggtattagacctttgtctgatgcatagtttgcaaatattttctctcattctgtaggttgtctgtttattctgttgatagttttcctttgtagaagctattaagtttaattagatcccatttgtcaatctttacttttgttgcaattgcttttggtgtgtttgtgcagggtctttatttgtagctgacttcttatatttggcttcacagagaggtatgttagcaaaatatttttcgtgttgaagctttgtggtgtgatccagtaggtggcactcaggcatagtggtcagttggtaggctcttgctcagttgtgtgtctcccttgtatttcctcatagttgcagccatgtttcctctcaatgctctgcaagtgagggttcctcttccacttaagtcgtggctatagactacaaattggcacccccaggccgcccaccacagttttggtatgttctcagggtttatgtttcctctccaatttggaggcagcagagtaagagaccttagtagtggttgtggctgagggtcttctgcttgtctgaaggagttcataaataggatataaaagttattagttttgtaagagaagactaaaaatttagatttcattaaaattaagaacattggttcacatcaataaacattgttaagagaacaaaaaggaaagccactgggagagacaagatatttataagacatatatttgacaaaaatctaatctagaatatataaatagggcctatgaattgataagcaaactataaacaatccaataggaaagttgatttaaaaatttgaaggtacttcaagaaagaaaaggcagtaaagattaaaaaggtgctcaataaaggatccatcagaggcatgcaaattcaaacgaaataaaatatcactacccaccacaggaatgggcaacattttaaaaaagtcgaaccaaatcaaggattattgaatatgtgaaacaattgtaaccttcatttcattctggaaaactgtttagcagtatctatatagaccttaattatgacccaacatttctacttctagatatatatccaacagaaattcataccaatgagcaacaaaaagtcaagtgcaggaatatttatagcaacatttgatttataatgagaaatggaaatttctattaaaaataaaatagaaaaagaagtcacaatatattattcatcaaaaggtatattatataacaatgaaaataaattttatatatatatatatatatatctccaacaacatgggtttaaatctcaatataatattgaattttaaaagccagatacaggacagtaagtattctatgattccatcaaaatatcttgcaaaaatagacaaatctaacttgttctgctagaagtcagagtggtggttacctttataaaggaggcaaaagaaggattaagaagaggtgcaagcaggatttctagagctggtgatggtatcattctatttcccaatctgtgttgtggttacatgtatgtcttcattttttaaaagtgcatcaaacttacacttataaattatgcacttttctggatatatagttcagtaaaaaaaattacaaatgctagaaaaaaagataaaacctaaagaatatagagtcagaaaataataaagatatgagtaaaaattcatgttagaaaaaacaaaaggataaaaaactcaataaaccaaaagccattttttttggaaaaaataagaagacaaaaatagagcaataaaatggcaattctatagcaaatctactcaagaaataaagggaaataatttacactactgttttaatcataattatatatttatatttatgtaataaataatgtaaataaatattttttacattattgacatcaggcagtgggttagagccagatggtttcaatttcaatcaattggtaatggggaacacctgaatgtttttgagcaaggaaatgatatgatctgattgtcttctggaaagatctctctgggactagtatgtagaatgattgaatgaccagtatgtagaatggttctactaatatgtacaatgattgaagaataactattttttaaaagaaataaattttgctccagaaataaagggaaattttaaaaagaatacttttcttggtccttctcagtttatgctatagttgtatttgtttgaggcattacttttcaagtgcttttaaaccagagctgaggtttattttcatcattcttttcattaatctgaggggcaatgatccattgtttgtgactcaacattctggatttgcataatagaagacaggcaatttgtttcaaactcacagaaaaatatttcaacacatttgtctttttcagcatccttaccagttatgacattgacatcatgaaaaaatactaattctaaaatagtcacagatatttaatttaacttgcaatgcatttgcttctactcaacaataactatgtgtctagcacctggtttttatttaaattttattaattccataagcaaatactgagcttccagtttgtgctggccacagagcttgatcctaccatgcaacagtgtgtaaaacaactacctccctgaaggaactctaaccctgtggggccaagaaatagacatacataaacaattacattacagggctaggcatggtggctcatgcctttaatcctagtactttgggaggccaagatgggaggatcacttgagcctaagagtttgagatcagcctgggaatcatggcaagaccctgtctccacgaaaataaaagttaagaaaaaaaattagttgggtgtggtgggatatgccttcagccccagctactcaggaggctgaggtaggaagatagcttgagcctgggaggttgaggctgcagttagctgtgatcatgtcactgtactataggctgggtgacagagaagactctgtctcaaaaaaaaaccttacattatagagtattatatgctgcaatagaaatatgtctggagtcatatggtagatcagaggagaaaacaattaagtttgttgagaagatagaaaagggttgaaggaagatttcacacaatctgagcattgaagtacatgtgggttttgtctgatgagaaacagggatgagctgaaagcactataggaagaatcattagcatgcagtcctggacaggcatattgtgtgcagaaaggcccagagataattatgggaacattcaaaggaccccatttgtgaagcaacttcaggccctgctacgatgctcaatttcagcacaaagaggcaagcccagcagactcctagagagatggatgagaaggtccagtgtgattttgaaagataacattccgttcactctgctctgaaggccctgtgagtgtcttgccatcacttgactatactatgaatgttctttcagatcttcctgctttgtgcggtgcaaagtgctatacttagtctgcttttaaagcattgcctgccagcataaaagtcacatgtccttggaactatttctgagcctcctggcatagtcagtttctccctccacagtatttgtgtgttgccttgtacatatgctattacaagattcaccccaattaatgataaatacgcttccagtccttcactggatttggggatatctgatgacactggatgctgcctttcttatttatagccttagtaccctgaagagctctaagtatgtaatgaatatttaatcaatgtttgttaaacatagctctcaatcatacagttaattgtgtttaagaaaatggcctatcacataaccgtaatgacccagaagaatttttgtattgtgaaatatcgcaccatttttgtttgataattttgaattttcaaaattagcatctcctatgataaaagaaactaataaatgctttgaaaagaaagtcaagaaaaagtcctaacatttacttgacacttactagaagctcatactatgctaagaatatgtgtcatagttaatcatgtgtgtcagcttggctaggctcttgtgtccagatgtttggttaaacaccagactagatgttgcttctaagttatttttagatgtaattaacatttaaatcagtacatgaataaagtggattaaccccctgctttaataatgtgggtgggcctcacccaatgagtcgaaggccttatgagaaaagactgaggttcctccatgaggaagaaattctgcctccagattgccttgaaactcaaggctgcaacatcaaaaatatcaactcttgtcagaatttctaggctttcagcctcttctgcaaattttcgacttgccagcttccataatcctgtgagccaattctttagaataaatcaatcccctctcctcattaatcttagttagataacacaacctgacatcattcacacatcacacacagcttttgaggccagtattattctcattttttgcacaaagttactgaggctctgaaagcttaagtctcttgcatggtggatgtagcaggcagtaatactcttcaccaattatccatttctcctagggtgagcaactgttctggcttgcctaaaactgtgtttagaggatgtggttagagaagacagcatgtaagaatcatgaacttaaaccaggaagtgagagctgactgctctttctctaagagtttcagggacagttgcgagacagagaccctcttaggatggaagagaaatttccacagatcccattgtactcagaagagcactggtcaaggaatctttggttaaaaccttgaataactgttttctctcaaagctccaagtcacctatctgtgaagtaaaggtgcataccacatacttactccaattcctttcagccctgacattttatggttgagaaaatcctcctcagtatcatcacagatacatctcctagattttcttgatcaccagaaagcaaaggagaaagtctaacataaactcaaaatgcagacacaataaagaatacactaacgagtctgtttgggctttttaatcagcagaattcattatggtaaatgtgaatggctttgtagagttcttaatttcctgtttatcccattatatttgtatcataaatgacttgacttttagtttgtggttaagaatagaaaagggtagttaaataattatagacagtatgtattctttactgcaactgagccagacatgaggcaagataatatgaagacaacccaactgcagccaaagctctttccctgtggacttctcacccagcagtcagggtgtagacagctcatgctgcttacagctctcctggccttgtctgacagccaccacttaaatgcaggtgtccctcagcatcctctttctgtcagaaccgaggcagatttgaatttcttctgttgtaaagtgtgtgcattttaacagctttttgattgaacaattctctaaaagtgcggttggagtttttgtatcatatgcttttatgttcagacacaaagatttatttatgttgaatttctaggtgatgtcagaattgcaagagttctttatagatgagtcaacagattctgagagctgaactaatttatctacagtcaaatacactatttatttgctacacttgaagtgtgtagagttctatgctggggccgagcatggaagagggatgcaatatgttctctaacctctgtgaggctagtactgtttctgaactatgaattggttctttagataagggaagggaaatcaaattctgcctaaaatatgtggtaaagatgtcaaaaaagaaattaggaggatgaaaaataactctctattgcaagcagagagggagcacacaccaaggcctagtagtggaaagaacatagtattcttaggaggcagagagtttttgttgctgttgagaaccttgacagcatattataataaccaggggaactataaaaagtatggatgctgaatgccatccccagaccttctgcctttattgaaggtaggtggaaattcaaattgctttacacttttcaacagttagtattgagtatatcaattccttataaaatggggaagaacaagtaccccaaaaagtcccatacatgaagaaaaccttggaggccttcttatccactcctgtgatttttacaaagaagatgagaactaaagataatttatttactcataaacatattgaaaatttcaattaaggctgacatagccttaatttttatactctcttcttacaggactgactggacaaaacatttttatactctcttcttacaggactgactggacaaagttgagcccctttaatatgtgctgattggcaatatttattttaaggcatgagcatatgtaatctgataaccacccattcttagccagtgtctatgttaactaaggttgatttggtcaactcaaccacgtttcccttggaagctgttttgaatgtgtgttagtcagctctggctgccataacaaaataccatagactgggtagcttcaataacagaactctattttctcacacttgtggtggttgcaagtccaagatcaaggtgccagcagagttgtttcagtttctggtgaggacttttctgagctatcagactgttgcctccttgctatgctctcacatggcttttccttggcacatagctctctggtgtctcttctaataaggacgctaatcctattggatcggggccccacccttatgaccttatttcatgttaattactttttttttttttttttttgagatgaggtctcactctgtcacccaggctgagggaagtggtggaatcttggcttgctgcaacatccacctcctgggctcaagcaatccttccacctcagcctcccaagtagctgggactacaggtacatgccatcacgcctggctaattttgtgtatttttggtagagatgaggttttgccacattgctcagcctgtaatacttctttagaaggccagtcaccaaatacagccaccctaggggttagggcttcaacgtatgcattttggagtgatgcaaacattcaatctagaacaaactatataaagtattcatcaagcttgtgtttttcattgtgtatacatgcaaatatttaagcacaggattttcaaaggaggtgagggttgactttgtttagattattgagtttgattttctatttgtatataaatgccttacacttagtagattaggatacattttgcctgaaatcactttgaatgttttgctcttgcctgactgtgggttgtaagatattaactctatgcacagatccatctggcttttcttgcctatatgatgtaaagttttaaactaagacttgaattataaaatattctaagtattcaataccagattgtttaaaaaattaaagattcatagctggcaacaaaaaatagagagagcatttgggctttggactagacaaaacagatttcaaattctggcccccttccacactctgaaagaatgtggaagttgcataaatcctgtctaagcatcagtttccacttatatgcacattgaataatattaacttcatgagtactgtgaggataaagtatatccattcaacccctaaccagtatcagtatttacactatttaacaactagtaagatatggtattgcccaatcataatagacgctgcccactggaaaacaaaaacaaaaacaaaaaacaataaacaaacaaaaactataggtaaatttcagctgaatgctgaatttttgttcaatcattggcctgaataaatgtaggtataggtgcaggaaatgcagaaagtaatggaaaaagatccatatcttgagagattcaaagtacactgagggaacatcagacacagaacaaatgtaatacagtgttatagataatatgataatgctgtggtctagatatttgtctcccatgataccaaatatagaagtggaatcctaatcctcaaggtgaaggagatgaggactttggaagctgactaggtcatgatggtggagccctcaccaatgtagtttgtggccttataaatgaagccccagaaagctgtcttgctcctttcaccatgtgaggacgctgtgaaaaggcaccatctatgatccaggaagcagccctcaccagacaccacatctgttggacgtccagcctccagaactatgagaaagaaatttctgttgtttataagccactcggttgttttattgtagcagcctgaatggactaagacagatggaaagtgtgtgatgagtgaaagtgactagtatgagcctggcataaaacaggctgtcttctcttcatgttggcctggatagggaaaccaatcttttgcatcatcatgagattaagcatcattttatctaacataagtgggagggagagagaaaaatcagaagatagaaactactcatattacaaataaaaggaaaccaatttaaaaaatccagctcattctagtctttatcttgtactgtagtgcactggtttagcatgctaccctccaggcacgtataatttgtcactgttacccaaacacataagtaatctcaataatctaaaaataataataaccttttatatccagtgaaccaagcgttgcactacgcattttataaatatcatcttatttaatcctctttgaacctgctaagaagacaatatgatctctgcttgttcagtgtgaaaactgaaggtcatagaggtggagtcaatggtcaaggtcacctgacacaagttcattcaatgcttggatttggttccaagttaccatcatggatggacccagtgacttcctagaggctgcagggcagcctaatcccttgcttgtttctcatctcacgtggactcattgaaacaaaagacaactcttacctaaaatggtgaagtatcataagaaagtggaatccccaccttaaagagaaacaatgtcatattatgacaatatttaaggaaacaaaaattaaatattttacagtattagaaatatgattactgaataagtcctttcattatgttgatatgtaagggcacagagagaggtgagagagagagagaaagagaggagacacttgacacttattgaacaaagggagattttggtgttatccttgtatgtatagtgatgtgtagtctgcactagtcaaaaaagtatgtgaaatgctaccaacttggattccttgcacacaaatatacgcttttttttttttttgagacagagtcttgctgtgtcacccaggctggagtacagtggtgcaatctcagctcactgcaaactccgcctcccaggttcatgccattctcctgcctcagcctcccgagtagctgggactacaggtgcctgccaccacgaccggctaattttttgtatttttagtagaaacggggtttcaccatgttagccaagatggtctcgatctcctgacctcatgatccgcccacctcagcctcccaaagtgctgggattacagacgtgagccactgtgcccggccacaaatatatgcttttaagtaaaagtgttactaacagaaacaaagaaggcagtctttatgattgcaggcttacccaccaaaataagtccagaggttctttattttatagtctgacacagaaatcatacatgttgcctcccaggcagcaacacaagagtgttgtcccttaaagactggccaaagaaggggtgctcatcagccaaggcccacctgcagtggttaacaaaggatccatggggctcagtctctgaactcatttctctgtagctgattgcaatttttgtttttcaacccatgacctgggttgacctgaaactgcctttgtctggctcaatcacagactttccaatcctccagtttcaccgtcaattttccagggtgcctcggtttttgtggctagtagcatcctgtgatctactgtgctcttgctgctatgactgctggcacactgggacatttgggggttatgtgactgagtcatgccagataatttctttgttccatctgcctattccttgctcctgcctgggctgcacagattggtggttactatttattaacttttgcaatgaaatcatattgcatttcagggtccacaccagaggccaactattaattctaatattggaagtcaaaccaaagttcatgggccacaccaaagtccactgctatgtgtcagaacagaacaaacaaaaagccaagctgagctagaattggcatggtaaacagccgctagaagaaatcagaactggaaaaaccaaaggggagaatccaatcaatgtccaacttggctaaagatgtagtcttgccatccgagacttactgcaaagggctagagtcatgtttcccagtgcatgctgtgggctttgtcaaacctgctgcctatcagctgatagcaagaaggaaatcaccacaaccatgcactcctattcccagctaactcttcccttcactgaaatgatgaaatgatggtggcattctggctttgctcggattacataatactcacattaaaatggggattaataatggagatttcactaacaatcatgagcacgtatattcacacatattatttcctccaatgcccactcttaaaagcaatatgaagctccttatagtaaacactatagctataatacgtctattaaaatgagatgaaagtgcacagtggcaagtaatggagtagcaatagagacaggccaatgaatcgtgagtttcaaacctgaagtttctggtggcacctgcagaagaaatgaaaggcataactgtcaaatgaaacttatcattatgccctgcaaaaagtaatcgtttggatgcgaaaaccactacatgccagaaactgattactttatgcaatcgtctcatcagtgccatgttttaaaagagaggaagacaatttatcccaagtcagagcagcagtggaggaaaagctagatttgagggaataacatcctcactctaatgtctatctgtgttgccctaaacagaggctgcttctccatggggatataatcaggccccaacacaaagatcagcttacaaagattaattcagttatcctaattgttttaatcttgctgactttcaaaagtccatttgttaatttacttaacatattcattcaatttctgtcatgtgtgcaaggaatacacagatgatgagagagttttgccctctgtcctcaaggaacttacaaaaccagtagagagagacacataatgaatatattattagagcagatgcccagtgtatgctttttctgatgataaagatcatcatgaagaagaagaagatgatgatgatgatggtgacagtgatgttgatgatgatgtcacagggaggcaaaacagaaggaaaggaagaggaaaagaagggtagatggaaggagaaacagagggggtacagggagaaggacaaggaaaaaatctagtcatttttagacattactctagctcagtgctacatctcagcacacctcctgagtcctggagcccaccatcctcttaagttttttttctttctttctctccagcaatgaagattcaggctcaagctcaaaagccatctcagcatagttcactgagttacttcaagtgagacaacattattaagtgcattgtcactttgctttgctttgtctttacaaaaagccatcaaaaatactctcccatgcattggtcatgataaggacaatgtcatggctgaagatgaccctggaacagatgaagatgagtttcagatgaggatgagctgccaccaccttcccttctccagagctactgctgagcactggagcatctgtcccttgggggaggtggtggagggcaggagcaagggagcaaataagactttcacaaaaaaagattcaatttattccagggtccatgtggctgcattagtaatggtgaaggaaatagataaccaagattcatctgccacttgagaaagtgcatgcagaatggtcgatacacttgtttgttttaataatggattagatgctatatggaaaatgtaaaactcctgaagctccaaataagacagctaatatcctacctgctatgaatttcaagcactctatcttagcaacctcttttggaaagagcccagaagcaagttggaaagcagtgagtgctgccctagtccatggaggtggggtgtccccttccccagagcagccaggatgttctgatgtggtgtcatcctcctgaccctaccacaggccaccatttgcactgggggaaaatagtactcaactgcatctcaagttgacagagcaaccttctggtctctggcctgctctcaactggcagtgtaaagttctctgtatcacttgacctttctgaacctaagatgagtccaaaatcagtagtagcagtggtgctggaagaaataaagaagtggaaagaaaagtaataataacatccaattaactgcctatcacttggcttactacctaccatttagcagtaataattacccctgcacttcaaaatagatgtctttctctttggtttcagaagaagagagaccgagactcagacagggtcaagccgttgcccaaggccacagagttggtgagtggcacggccaggacttgaaccctagtaaaaatctttttcctctgcctcagctttcattatgtaatgctgcctccctatggggttcccctggtgactgcttgtatgcaagggagagtgggaaacccaggatacctctcagagttctgatgttagcaggcaattctctgggaagagggaagggagaaacacaagtgcacatgggcagccatcgtgtgtctgggtgtcagaggacaaccatgcccttgtccttccatgtattactgtagctcactcccccatccatcagccttctttaaatgcaagctaggtttttgggcttcacctaccttccactcttttctcaactgaacacaacctggtgtgttccctcatttcacaagtgaaagtatgtattctcaatctccctaattattgaaataccacttctgttttggttgtatgaaccacactttcatgttttctttctatctctgattgccctcagacttaattgcctgcagcttatcatctggctgctttgatcatatctctggtttttgctgtaagtcctctcctctcctctctcttctgttcttttccctgctcttctctctccccacatgctcttactgagcaatcttatgtacttctttggagtcaattatcactatgaactgttatcaatgcctccctaatatctgtcatgaagtaagcggtcaacatcatttaaatatttttaacaataaataagtaaattattaataggtaaatggatttaaatgtctaacaattggaaaagggctctgatttagaaacatacatctcagatttatctgtattgagatgacacttaaagccaaagaagtggctgaaattatccacggaatgtgtgttaggaaaacaaagtcctaaggaacactaatagttacaggaagaagagagaatggggatctcttggagaagtgacagttaccaagacagtaagagtgaagtgcagaggacatgcaatgttagaagccaatggaagtaaaagtttggtggtagaggggtggtcgacaggctctgaaggcccagcaagggcacagaaacatgcccttcagatttggcagtgggaaggtcactgctgcttccaggtgggaactttcagggtcactcttttcccatcaggccaggtacttttatgcctctaagtctttgcacattccattcccctacatctaaattgctatttatttctccatttctgtttctgacaagcttatattcatctttcgatgcttgcttatttagtcaacaaatatttattaaatgtttactatgtgaaaggtattggtttgaaatccctcaaatgtcatttcctttatgagaaattccttcaccaatcccccatgcagatgcaaaggtttgcttctctgtgcaaccacagcaccctgtacacctctgaccaaaaccctcaatccccagcccactgaactgtggacagctgtttactcactctctctagaacaaattcttgagagcaggaaattggttttattcctctctgtatttatagcaccatattttatgttaaattcatttatctactgactcttcacctttatttaaaaatcattttgatttttatctcttttcttttgatacctgacaggtatcaatgatacactgatggaagcccatgttccctgttataaaagaggttacatttattctcgttggaaaaaagaatcatatatgttggaagtatcattgaatggatttgaataaaggaataattgtggctatgcatgtataaggcaagctacttcccttcatcactctttagttgttatccattagaagaaagattaatttcttccatgacaaaaatggtagtctcatttttatacttactaattaatgacctgtttataaataattcctggcttatttcacaaatgtctgaagtaattctgcttaatctctaccatggtcacaactttacctgttccaacatctatccaagcagcatgtcttaaaatttgaagaaattgtaaataatggggtagagccactcactggaggtatgaacaagctgccaaattgctcttcaatttttaaattgctttgacacaagcagcaaccatgaaaaagataagcttagtgcttgtcaaaccacaagtgcgctataagcagatttcagagaggattttatgtatggcatgccacagtctcactgggagctgaaaagcagttgtgagcatatctggcattaagggaaattattaaaactctatgatttgaaatggatggtttgcttccttttccttatcccactgcagattctactgaccaataattttagtccgtccatttatcccctgtgccaggataaagtttcgtaggggaaatctaaacagtttccagagtggactctcattccttgcttccttcctgccagcttctcttcacatgtattaatttttaaaatatctacgataaggtactctctgtgataagttatgtgaacacaaaggcaaatgtgacccagtctctgacctcaagcatttctggtctagataagaagcaagagactaagtttttccctgctctcttctttgtgctcctaaggcagcacctacatgattgcatcataacaacagagtgcatcataattatttcaactattatctttatttgcctaatgctcttcttctacatattctgtttacagacctcaccactctgattgcaagaatgagtctgtgactgagacccggcccatcagagtaaagcatccgctggtaacacaagtaatttaggaatgtccacataacccaaaccacacaaactggaagccctctctaagcattttctgctggaactaagaacaaagagtttttttaactcttgcatgtagtaaattataagaatatgactcaacatgatagcacatttactgtcacatggataaacacatgagaataaagatgattttgagagaaaagtggtgatgagaagtagacagaaagatatctagcaacatcaagtcatttattcctgtctcagatataactggatttctctagttaatatgtataatgtaagagagtttttgtttatttgtttgtttgcttaagttagatcaggttgagattttgacactccaaactcaaagaaccctgactagcaattggaattgataccagaagtggggacaacaattttgaaaaccaaaatgtgggactgggttttgtcaagatgagataggggaatcctcattaatcactctccactcccctgatcatcttcagctaggaaatatcttgttgaaaagtagaacagcattgggttacgggtttcttgtggtatcttgaaacttcaaccatgtgcccaacaaaaccagaatatcagtgacttagtagaaaaatgtgatgatattggactgtaggctctgttctgcattcttcagtaaatttctacaacaaaaagacaaattgatttacctgaaatcacagagaaatctgtatgcacctctacataaaaaattctttctacacagcctcagcaatgctaaactggaaaggttaaggcaggaaagtcctctgtagaattggaaaactaattgttttaccccgtcataaagttagtataagcaaaaacagggcagtgagaaaagtgaaagaagattagattcttccctgcctacccaaggtaatcattccctatggcctaagcaacttggatgcagtggtgggcaggaaagggaattagctttaacttatcatcctatcctttctttcactttactctgaggtaggagtcaagacagaagccattaatctgatggtcaaaatgtcaggcctattgataagcaatcaaaggggtatggtacttatttaaagataatgaccagacatatattcttgcatcagacttccagactagtattttaaagaatacttaaggctagataaacaccaagtatcaaaaaaagaggtttggatggcacattccctaagactgtcctcaggctcattcaaggatattcagcaaagattcaaccatagaatgggatttcttctcactgtacaacaccttttatgaatggcccaggatgatgccaggtaagtgaattcacccagtaggtagattctgtggcaatcatatcagttgaaaaaggatctcagtctattactaacaagcaagacaatgaatggatgtacatttctatccctatccattggagtattgtatatctggccagtggccgctgaatattacttcctcttcctccctttttccatgagacaattatgttgattaatattttacctcaggaatgcttattagagaaaacagatagtcatatttatcattagctgaaagtatacagaatctttttatgccccaactagatctcagagagaggaaggcacagtattttaaaaccctggatttgaggaagaaataacatctggacataattttagaagcagtaattacaatgggtagctgttatattgggaaggagtatttttttcaatttttatatgctaaaaagattttgtaagtattctagaaaattaaagacttgattgtaaacagtacacaagactcctttcttctggtaattggaaataatctcctttggctaccactaatatgggcaaatccacatttaggtctctaaaattattctgtctcctgaggatgtttcagggtcagcctgtatgtgtatttggaacttttctgctacaaccattgagggatggtctcctctgttctcaagagtcttgcagcttcaaacataaatccttaaaccattcggtggccagtgtacctgtttgaggaagacgaaatcaagggggaagagaaaaggtgagcccaacatagagttctcagttttggtctctgatgtcctcagaactttattggttcttgtggctcccaatacaattatacaaaccaaactagtatctttccagttaattccctttgtcattaagctggttaaaaatgggtctctttcacttctatatgaagaagtcctgaaaggtactgttatcttttccatggagtcattgaacattcacgtaatgtaactgaatttctttaacaattatacaaatttaacccaaattggtaagtcattcaacacttttaattaagaaggaatcactataaaaggcagaatttatataaatcattattaacagccttccaatttaaacatttattgtcctcacaaacagtatgactcaatcaggtgttaaagtgaactaaatatggcctgagaaggactccatacttctatatttgaattcttgtggacaatctgcaacctagctcaataggtagacaagatcaaaaacctaatttaggagtatgcacctgtaacaatagctgagaggccatacttcaatcattcatacactgctgagtgttcagactgttcaaataaggcaaaagctgagctgtaaccaatcctgctgttctgtacctcacttccaatttatgtacctcatttcctttgtcttttttttttttttttttttttttttgagatggagtttcgctcttgtagcccaggctggagtgcaatggcacagtctcagttcactgcaatctccgcctcttgggttcaagcgattcttctgccttgacccctcaggtagctgggattacaggcatgcaccaccacacacggttaattttgtatttttagtagagacggggtttcactatgttggtcagggtggtttcaaactcctgacctcaggtgatccacccacctcagcctcccaaaatgctgggattaccggcatgagccactgtgcctggccattcttttgtctataaatattctaccaccatgttgctgtgttggagtctctgcgaatcggctgtgactctgggaggctgcccaattcgtgaatcatccattgctcaattaaactcctttaaatttaattcgctgaagttttccttttatcacaggtattataaatgttcattcaataaatactatatagctaaaaggcagcaaggcagagtggccgagatcctggcttcatagcaggcaaggcccagggtggacacccattatcatttactaattgtgtggctttgaacagcttaactatcacccagcctaattttcttcacctttaagattagcaggatactaggaatgttgtcagcgttaactgagtaatataagcaatactctcaatattgctattgtgcatagttcatgatcaataaatggtgttctcattgataccctcagccatgtactcagatgttactaataggatgagagattcccatgcatatctgtagtcagagccaggaacatttattcccacaatgctctctggtcattattctaaactatcttggtactaatcagtaatcaagcttatgcaaccactctgtgcaacgcccagtcctgagtgctacaatgtaccttgaatgatgcaagaaaaggcctgaaatgaagcacagagaaagaaataatttagaaactcaagtgctcacttccctacaccgcccctctctttccatttcatatgtaaccagtggaacataattatgaaaaactcaattaagataagcttgtcttaaaaaaataaacacacactcaatttatatcatttcttggaattagtttggaaggggaaaattctcataatactattaaatttcccattcaactctcagccaaagaacaagggctgctggcaataattgctttttaaatgactcactgcaactcagggtaaaccctgctgtaattagtcttgcagagaaagtaccttatgaagagaatttggacagacccaaaataccattttgttctttctgcctctttccatgaaatcttttcagtctttcatttctgacagttgcctagtaagtccatttagagaaattatcattttcccttgaaaagctaagcagccaagtgtttaggtaatggagccacagaattgtccttcaagttggcttagagagctcattcaactgtaactcttgcccctgccatgctctgggtgtctgcttcatggattgcactctgcaaaactgctttttctatttctctgcacacatggcaggtaaatgacctcttagctcagtcacaaaacagacccaaatctcagttaggcaccacacccaactacatggtttctcaatgcaatgttccaatgctaaattccagggaaaaagaatctagttagcccagtatgggccagggatcatccctatttactaagttctggccagggagaaaagctcatgaagcacaaacaattctccccctttggagggcaaggaacacagttgtattagaggctgtgaattgaacagatgcccagaaaggttctactgttcacatagtatctctactgaacatatagtctctctagtttgctgaagaggaaattgaaacccagaaaatcaaagcccatcaagttatcaaaccggtgagtatgtagctttgaactcagatctttctgactataaagcttataacttctattaaattagtaagtagttgtcatagtggagtgtgcgatacattccactggctttaagaagaaaataagtatatagccaaattcagatcaaattcagaataatatcataatggtggtgtgtgaatcatctgtgtctgtggtataaaagttaaaactattaaaaataagtgtaactacaataatttgttaaagaatatacagtgtaaaaagatgtaaattgtgattttgatgtcacaactgacatcattttacattgtatatggaaggggaaattaaaagtgtagaggtttcatatgcaattaaagttaagttgttactagcttaaaatagactgttatgttttatgtaagcctgtaaccacaaagcaaaaatctatagtagctatgtaggagaagaaaagaaagaaatcaaagcatattgctacataaaatcatcaaatcacataagaagataacaagaaaagaacaaaaggacaaaggatatacaaaacagccagaaaataattaacaaaatggcaacagtaaatccttaccttttaataatatagtataccttgaagtatatcttacctattatttactttgaatgtaaatagattaaaatctctaaatggaagacatagagcgtggatgaataaaaataaaaaataaaatttaaaattaaaaaaataaaaaaatataggacccaagtatatgctgcctatgagatactcacttctgcaaaaagagcattcatagactgatagtgaaaatatataaaaatatactccaagcaaatggaaaccaagaaacagctgattatctatactgttacaaaatatacgttaagtcaaaaactgtaaaatgagatttacataatgatacaaaggtctattcatcaagaggatataataattataaaaacatatgcacctaacattggagcacctaaatatataaagcaaatattaatagatctgaagagagaaacaggtggcaacacaataatagtagagaacctgaataccctactttcaacaatgaataggtcatccagacaaaaaaatcaataagaaaacattgaaatacactttagtccaaatacacctaaaatatatatacagaatgttctatccaacagcagtagaaaacacattcttctcaagcacacacagaacattttctaggagagatcatatatcaggccacaaaacaagtcttaacaaatgtcaggagattaaaatggtatcaactattttatccaaccacaattgcatcaacaacaggaagaaaactggaaattttacaagtacaagaaaattaaacgacatgctcctaaaacatcaatgagtcaaagaagaaattgaatacaaatgataatggaaacaacaatgtatcaaaagttacagaagtagcaaaagcagttctaagaaagaattttatagtgatacatgcctacattaaagaagaagaaagatcttgaataaacaacctaatgttacaccacaagtaacgagaataaaaagaacaaaccaagcccagagttagtaggagagaaataacaaagattaaagaagaaataaaggaaacatatactataaaaattatggaaaaaataacaaaactgtgggatttttgaaaagataaaattgacaaatcttcagctagactaataaaaaaagagtaaagaaaattaaataaaatatgaaatgaaagaagagacgttacaactgacaccataaaaatacaaagaatcccaatcccagcactttgggaggctgaggcgggcagatcacgaggtcaggagatcgagaccatcctggctaacatggtgaaaccctgtctctactaaaatacaaaaaaaattagctgggtgtggtggtgggcgcctatagtcccagctacttgggaggctggggcaggagaatggcatgaacctgggaggcggagcttgcagtgagccaatatagcaccaatgcactccagcctgggcaaaagcaagactccatctcaaaaaaaaaaaaaaacaaagaatcccaagagattactattaacaattatatgccagcaaattggctaacgtagaaaaaattggtaacttccaagacacatacaacctaccaagattgaataatgacgaaataaaaaatctgaacaaactaataatggctaaggagattgaatcagtaattaaataaaaatgttccattaaagcaaagttcaggacttgatgatgtaactagtgaattctaccaaacatttaaagaagaatccatacaaatcctcctcaagctcttcccaaaaatgtaagaggggagaacattccaaacttatgagatcagcattaccctgataccaaaaccagagaagaatactatgagacaagaaaattagagatcaatttccttgatgaatgtagatgcaaaaaatactacattaaatactagcaaactgaattcagcagcacattaaaagaatcataaaaagtggagtttatcacttggatgtaaggatgatttaacatacacaaataaataaatgtgatacatcacatgaacagaatgaagtcatgatcatatcaatagatgaagaaaaggcacttgacaaacctcaactttctcttatgactaaaaccctcaacatagtaagtatagaagaaatgtatctcacccaaataaaggccatatttgacacatcgacatttgacacatcttactggtgaaaagatgaaaatttttcctctaagattaggaattagataaggatgcccattctcactacttctattcaaatagtactggaggtcctagctagagcaattagacaaaaagaagaaataaaaagcatcgaaatctgaaagaaaaaaagttaaattgtctctgttcgcagatgacattatcttatatagagaaaaccctgaagactccatgaaatatcataacaaaataaacaaattcagtaacgtttcaggatacaaaatcaacatacaaaaatcagtagtgtttctatacattaacaacaaactgtctgaaaaagaagttaggaaaacaatccaatttacagtaaaacaaaaaaagtatttaggaacaaatttaaccaagatggtaaaagatctgtgtacttaaaactataaaacattgattgaacaaatttaagatgatacaaataaatgaaaatacattccatgttcatgactggaaaaaattaaaattgtcaaaatatttatactacccaaagtggtctacagattcaatgcaatgctttttaaaattccaatggcatttcttcttacagaaaaagaaaaaacaactctaagattaatatggaaaacaaaaaaccctggaataggtaaagttgttgtgagaaagaagaacaaagctagaggcatcatactccctgatttcaaattgtattacaaaactatgttaagcaaaacagtatggtgttggcataaagacagacacatagaccaaagaaacaggatagaaagctcagaaataaatctatgcatatatgaccactaatctttgacaagggcaccaagagtacacaatgggataaagatagttttttcaataaattatgttaaagaaatgggatatccacatgcaaaaaaaaaaaaaaaagaaaaaagaatggtaaccttgttttactccattcacaataatcaatttaaaagggatgaaagacttaaatataagacttaagactgtaaaatgcctaaaggaaacctaggggaaaatgtctataacatttgtcttgacaatgattttttggatataacatcaaaacacaggcaacaaaagcaaaaataaacaagtgtgatgacctcaaactaaaaaagtttctgcacaacagtgaaaacaatgaacaaaacgaaaaggcaacccattgaatgggagaaaatatttgcaaactgtatctctaataaggggttaatataaaaaacatgtaagaaattcgcaaaactcaacatcagtagaccacatgatctaaaaatgggcaaatgacctgacatttctttaaagaaacatacaaatggccatcaggtattcaatatattattaaaaatggccaacataattaatcattagggagatgtaaatcaaaaccacaatgagctatcacctcatacctgttagggtgactgtgtcaaaaaataaaaagatagaaagtgttggcaagaatgtggaaaaaagagtaccctaatacattgttggtaggaatgtaaattggtacagccatttgtggaaaaacagtatggaagttcctcaaacagttaaaaatagaactaccagatgatctagtaatcccatttcaggatacatgtctattaaggaattgaatcagtatgtggaagagatttctgcatttccatattattgaagcattattcacaatagccaagatacggaaataacataaatatctactgataaaactatggttaacaaaaatgtgatgtgtgtgtgtgtatatatatgtatatatatatacacacacaaacatgcacacatactcacaagcacatatgcaatagaatattattcggtttttaaaaaattaggagaccttgccaattgtgacaactttgaacacagatgaacctagagaacactatgctaagtgaaagaagccaggtgcagaaagacaaatgctgcattatctcacttgtatgtagaatttataaaagttgaaattacagatgcagagagtagaatggtggctgtggatcggaggctggggtacatggggagaggttggccaaagggcacaaacttgcaattataataagtatacattttggagacctaatgtataggataggtgactatagttaacaacgtcttgtgtatacatttgaaatttactagaagagtaaatctcaagtattttcaccacacacacagaggataactatgtgaagtgatggatattccaattagcttggttgtggtgattatttcacagtgtatatatacattaaaacaatatggtgtacaacttgaatatacacaatttttattcatcaattatacttcaataaaaagcttaaaaatactattttggccatttgaggttaaacaaaatatatattaacatttttaaaaatacaaatggcagaaatatttttctctttattttagtatgaaaatgaaaagtaaattaaattctacacgtttaatatgcagattgactttgaggtcttgacttggtttgtatgtcaaatggtaacatatgctgtagagacaggtaacagttttttaatgcagagaacttaaaaattgtatttgcttatttgcttaccctttattccaatgtattgcactttatgtgcccttaataaaaaggatgaacagattacctgtaattttatttattttaccacaatatggataaatggtctaaaaaaatcctgcaaaaaatcccgcagcttgaacatagtaataacagcgccaaaagggactcataagaaatagcacagttacttgaaatatgattttaagagccacggttcttaaagataaatcttgcttcaagtgtatagtgaggcttgagatattagctaacgagagtataaagccattataattagaaagacatttaacatctaagtatgcagaacattattaataacatgcttcagtgaagtaaaaggttctctgtgctgggaaaaataaagtgaaatgacaggattttaaatacatcatctatttaatttttatatcatcccttttcactagtatttctggacatcattatagcatattaggttgaactatatgaaatggccattttcataggccaaaaggttgagcattagcaatttaatattttttaacccataaatagttgttgttgcacatgatttgaagtaaataaatatgcatctcctgggagactttctcgaagttttttgatagatgaggtgtataatcaacagaatttgtggaccactgttttgtctcatgttaaactaggagaaagattcgctgacacgacagcattggatccccctcaagggatgaatatgctctcaagagatggagaacgttttaaagagagaatgagggtatgcatcttgaggcagtgggtagaaagcagtcagagatatctgcgttggccaagataagagggcatgaaagtacatgctgacttggggcaaagggactaattttctttgacagaaaagtagagagtaaagagacatttattaaataaagcctctctcctcttgcacgaagaccacttctcaactggtcagcaggacagggggcagatgctaaaggcataatctgacagttcactttgggccatcacactgctcatcctccataccatgtgtcctcaagacccccccgacaaaggcttacatacgcaagtggttcatttcaatgatgagcctctgctttctctgtaaacacaagaagttttgcacatttatctggataagataaaaaatacattcctcactactcttctgagatctctttcctctgaccatcaattttctgccttccatcaataaacagtacgatggggatttagaaagtcaggtgtgaatctgccattatttctgagacaaactagaaaaaaaactaaattttcttcaataatttttgaaggaaagcaaagtgatatgaaaaaaaaattgccacagtggcatgaaccatcacacacacacacacacacacacacacagggtgagagagagtgagagataaacaactttcttgttttttgatgtattttatttttattgatacataccaagatgtacctattttcaggatatatgtggtaatttaatgcattcatagaatttgtaaagatcaaatcagtgtaaatgtgatatccttcaccttaaatatttgtcttttctttatgctaaagcaaactattctcttctagcaattttgaaatatataatagattattgtaaactatagtaaccttacagatatatcataccaagggatagaattttttgttgttgttgatgtagaactcatgtttataaggcattagctgaatacattccaagagaattgctaccctttttttggaatacagaatgagagactgaaaaaatagcagaaatcgttggatgttctatacacattgatgttgccccccgcccagccccacaactatccagacacacgcatgtgcaaaagcttgtggtaatgtggtctttcacatctttcccctaaaaactgataaaacatatgtcaatcatgccaattaattttatccacttatataagagacaaaatgcttccttaaaaacttggcaataacataacttacatttagtgaaaaggagaaccttttatccttcgttgattttttttccttaatacttttttatatctggagtactttattgtttctaattagaaagtggtgattcctcagggatctagaactagaaataccatttgacccagccatcccattactgggtatatacccaaaggattataaatcatgctgctataaagacacatgcacacgtatgtttattgcggcactattcacaatagcaaagacttggaaccaacccaaatgtccaacaatgatagactggattaagagaatgtggcacatatacaccatggaatactatgcagccatgaaaagtgatgagttcatgtcctttgtagggacatggatgaagctggaaaccatcattctcagcgaactatcacaaagacaaaaaaccaaacaccgcatgttctcactcataggtgggaattgaacaatgagaacacatggacacaggaaggggaacatcacacaccagggcctgttgtggggtagggggaggggggaggggggagggatagcatttggagatatacctaatgttaaatgacgagttactgggtgcagcacaccaacatggcacaggtatacatatgtaactaacctgtacgttgtgcacatgtaccctaaaacttaaagtataattaaaaaaaataaaaagaaagtgtagttaaataatggctgtacttttgtaaattcttcatgaaaagcactgatcaattattgagtgatccagccagcttcctcttgttatccatccctgaagcaagtccaaatgctttgcctatattatcctaatcaggtgccactaatcccctagtgtcaactagcagcatgactcacaggaattaaccagcctctcataagttcctcagaaaacctagccctttgccttgatagagcaacgaccctgaagtgtcataagcatcctgatttactaagaaggcttacatagcagacatgggcattccatccatcatttacaaagctcaggttaggcagtgcaactcagaaaagacgctacaatcactgacatatttactgttttcaaattaatggtatagtctcccatttaacccacacagtctttttgtgatagagttattgttattattataattttattattattccaatttcagttttgcaagtgggaaaactgagtggccagagaagccaagtatctttgtgtgtgtgccaagaatcttcgataacaccacacagcaaggaactggcagagctgaaactttcaactaaccttagagtccttctccctctcaacatgtctgaaactacaggaagaatctttctaaaagcagccccctaaaatcaccatctctaggaatggttataaaaatattttgatgtggagaaaaaggatacaatctaaacatttgccatagtgaaacagcagaacatattttctacatcgtatatcagtcaactttcagtaggttatgctacaaaacaaattatcacagcaattctagtagttgaaatcaacagagatgttgctcccattcccattcacatgagcagaatgcagctcttttcacagccttttcattccaggatccaggctgaaggatcaccttccatctgtgacatgccaggatatagccaaaatcagacagcaagcatagaaccatggggtggctcttaaggattctgcttggacattgcctgcataacttccactcccattccatcagcaaaaataagtcttacggaaatatctgatgtcagtagggggtgaagtcatctcctttcaaaggaaaggcctcccagaggggccctgtagatatggacctattagagagtgacagcaaatatttcagacaactcaaacaatgttttacatatacatactaagtaatagtatgcaggcttttgaaaatgaaacattaagtctatagttaatgacctgaaaaaatattcatgatgaatattgctctacgataattatccatctccacccactaatatgtaaattccatgaggccagacctttggtctgttttgctcacaaatgtatcttaaccacatgctgaaaaaagcatagatcatcataaaaagttattaaaatattgaataaaggaattttcctctaagtacagttttatagtcatatcgattttgtgcaatatttgagcaatcttttggtcttgagtgttttcttatttttgacccagtagatctttagaaattatattaaatgtttaaatgcacaattatttttatgtatggcttaattacattgaaatacttaaaatgatgtgcttgctaaagagtttttaaatttgaggagtattttctttatagtctaatgtaccacgaatattcataaatattcttggtatattgaagataatgtgtattctctaatttttggatgcaagatatctttgtatgttagtcattttataaattgtactgtttaataaaattttctatagtctcaccttttttctcattaaattatttattaagaaagtgatattaaaatatctcactattaatcaggacttagacatgtatttttgtaactatcgatttggttttatatattttcaggttatattatcaagtttatacaagtttaaaattgttataattgcctgctaagttgaaccttttattgctgtaaaagaatatttctgtataagtaatacttcgtttgaagtctatttgtcagatacctctacagcaacaatagccttacattgtctcttgtttgccctttatagcttttgtccacctctctctttttgacttcatgtgtcagcatcttttagatcagcttctgttaaataatgtattattagattagcttgtctatcctatctggaaatatttaacaactggcaagttgtgtccattattggagtaggccaatcacatagtaggtcctcaaaaaaaatttgttgaaggaataaatgagtaaataatttttttctgatatatttgagttgtaaattttatattaactgtaattatatatatgtatgactaacacaggtatataagtatttagatttctttatactactttgttttaatttctactttttttctgattttccccgtttcttgcttttttattaaaataacattttattattactttttatgctactactctaaaatgtatatactatatttgtctttttttagtcattaaactttttttacctagtgagttaataaaatatacacaatcttatctttacaaacctatcctacaatacaaaagtcagttcatccctttgtacatatttttttaaattttggttgggtgttttcatttcaccttgctttcttcaagccaatattaatgactattagtgctgttttagggaacccacgttgacatagatttgctcacatacttatggttcccctcatcaccattcactgtggcttcacaggccttccccacgaggccagttttcttcttcaggagtggaaacttccacggttctttcagtgagagtttgttggtgataacctctctgcggttttgttcacgtaaaatattttcatttcaccttcactctgaaatataatattgctgggtacgaagtgttacagtagtagttattttaccttcagcactctgaagaaatttgttctgtctctcgacttccacagagaaaacggagttgaactgccatccttttaaataatttgacatttctctcaggttgcctttaagacttttatctttatttttgaagtacagcagtttaactacaaagcatctaagtttgggtttcttttccatcaagctggctacctaagtctgatgatttctgaattttatcatgaattccttttgaaaaatatttccccctatcacctctagtaccccattttttctgaaacaaattaggctaaacttttccattctacccttcttttcttctacttcttcctactttacatctcttctctctcttctgaactcttggcaatgtcttcctgtcaaatccttgcaccgattcctcaagctgtcttatttactgtcctttacattgtctcaaatacttttgaatttcagtgatcacattttcttttctagaggttctatgtgttcttttaaaacatgcctgaaatgctattggtagtatcttattcctttctcatggttctcattttttacattcttcaacattttttttttttttttttttttttttttttaatcagcttttcttttttttttttttttttttttttttttttttattatactctaagttttagggtacatgtgcacattgtgcaggttagttacatatgtatacatgtgccatgctggtgcgctgcacccactaatgtgtcatctagcattaggtatatctcccaatgctatccctcccccctcccccgaccccaccacagtccccagagtgtgatattccccttcctgtgtccatgtgatctcattgttcaattcccacctatgagtgagaatatgcggtgtttggttttttgttcttgcgatagtttactgagaatgatggtttccaatttcatccatgtccctacaaaggatatgaactcatcattttttatggctgcatagtattccatggtgtatatgtgccacattttcttaatccagtctatcattgttggacatttgggttggttccaagtctttgctattgtgaatagtgccgcaataaacatacgtgtgcaagtgtctttatagcagcatgatttatagtcctttgggtatatacccagtaatgggatggctgggtcaaatggtatttctagttctagatccctgaggaatcgccacactgacttccacaatggttgaactagtttacagtcccaccaacagtgtaaaagtgttcctatttctccgcatcctctccagcacctgttgtttcctgactttttaatgattgccattctaaatggtgtgagatgatatctcatagtggttttgatttgcatttctctgatggccagtgatgatgagcatttcttcatgtgttttttggctgcataaatgtcttcttttgagaagtgtctgttcatgtccttcgcccactttttgatggggttgtttgtttttttcttgtaaatttgtttgagttcattgtagattctggatattagccctttgtcagatgagtaggttgcaaaaattttctcccatgttgtaggttgcctgttcactctgatggtagtttcttttgctgtgcagaagctctttagtttaattagatcccatttgtcaattttgtcttttgttgccattgcttttggtgttttggacatgaagtccttgcccacgcctatgtcctgaatggtaatgcctaggttttcttctagggtttttatggttttaggtttaacgtttaaatctttaatccatcttgaattgatttttgtataaggtgtaaggaagggatccagtttcagctttctacatatggctagccagttttcccagcaccatttattaaatagggaatcctttccccattgcttgtttttctcaggtttgtcaaagatcagatagttgtagatatgcggcattatttctgagggctctgttctgttccattgatctatatctctgttttggtaccagtaccatgctgttttggttactgtagccttgtagtatagtttgaagtcaggtagtgtgatgcctccagctttgttcttttggcttaggattgacttggcaatgtgggctcttttttggttccatatgaactttaaagtagttttttccaattctgtgaagaaagtcattggtagcttgatggggatggcattgaatctgtaaattaccttgggcagtatggccattttcacgatattgattcttcctacccatgagcatggaatgttcttccatttgtttgtctcctcttttatttccttgagcagtggtttgtagttctccttgaagaggtccttcacatcccttgtaagttggattcctaggtattttatgctctttgaagcaattgtgaatgggagttcacccatgatttggctctctgtttgtctgttgttggtgtataagaatgcttgtgatttttgtacattgattttgtatcctgagactttgctgaagttgcttatcagcttaaggagattttgggctgagacgatggggttttctagataaacaatcatgtcgtctgcaaacagggacaatttgacttcctcttttcctaattgaataccctttatttccttctcctgcctgattgccctggccagaacttccaacactatgttgaataggagcggtgagagagggcatccctgtcttgtgccggttttcaaagggaatgcttccagtttttgcccattcagtatgatattggctgtgggtttgtcatagatagctcttattattttgaaatacgtcccatcaatacctaatttattgagagtttttagcatgaagggttgttgaattttgtcaaaggctttttctgcatctattgagataatcatgtggtttttgtctttggctctgtttatatgctggattacatttattgatttgcgtatattgaaccagccttgcatcccagggatgaagcccacttgatcatggtggataagctttttgatgtgctgctggattcggtttgccagtattttattgaggatttttgcatcaatgttcatcaaggatattggtctaaaattctcttttttggttgtgtctctgcccggctttggtatcagaatgatgctggcctcataaaatgagttagggaggattccctctttttctattgattggaatactttcagaaggaatggtaccagttcctccttgtacctctggtagaattcggctgtgaatccatctggtcctggactctttttggttggtaaactattgattattgccacaatttcagagcctgttattggtcgattcagagattcaacttcttcctggtttagtcttgggagagtgtatgtgtcgaggaatgtatccatttcttctagattttctagtttatttgcgtagaggtgtttgtagtattctctgatggtagtttgtatttctgtgggatcagtggtgatatcccctttatcattttttattgtgtctatttgattcttctctctttttttctttattagtcttgctagcggtctatcaattttgttgatcctttcaaaaaaccagctcctggattcattgattttttgaagggttttttgtgtctctatttccttcagttctgctctgattttagttatttcttgccttctgctagcttttgaatgtgtttgctcttgcttttctagttcttttaattgtgatgttagggtgtcaattttggatctttcctgctttctcttgtaggcatttagtgctataaatttccctctacacactgctttgaatgcgtcccagagattctggtatgttgtgtctttgttctcgttggtttcaaagaacatctttatttctgccttcatttcgttatgtacccagtagtcattcaggagcaggttgttcagtttccatgtagttgagcggctttgagtgagattcttaatcctgagttctagtttgattgcactgtggtctgagagatagtttgttataatttctgttcttttacatttgctgaggagagctttacttccaactatgtggtcaattttggaataggtgtggtgtggtgctgaaaaaaatgtatattctgttgatttggggtggagagttctgtagatgtctattaggtctgcttggtgcagagctgagttcaattcctgggtatccttgttgactttctgtctcgttgatctgtctaatgttgacagtggggtgttaaagtctcccattattaatgtgtgggagtctaagtctctttgtaggtcactgaggacttgctttatgaatctgggtgctcctgtattgggtgcataaatatttaggatagttagctcctcttgttgaattgatccctttaccattatgtaatggccttctttgtctcttttgatctttgttggtttaaagtctgttttatcagagactaggattgcaacccctgcctttttttgttttccattggcttggtagatcttcctccatccttttattttgagcctatgtgtgtctctgcacgtgagatgggtttcctgaatacagcacactgatgggtcttgactctttatccaacttgccagtctgtgtcttttaattgcagaatttagtccatttatatttaaagttaatattgttatgtgtgaatttgatcctgtcattatgatgttagctggtgattttgctcattagttgatgcagtttcttcctagtctcgatggtctttacattttggcatgattttgcagcggctggtaccggttgttcctttccatgtttagcgcttccttcaggagctcttttagggcaggcctggtggtgacaaaatctctcaacatttgcttgtctataaagtattttatttctccttcacttatgaagcttagtttggctggatatgaaattctgggttgaaaattcttttctttaagaatgttgaatattggcccccactctcttctggcttgtagggtttctgccgagagatccgctgttagtctgatgggcttccctttgagggtaacccgacctttctctctggctgcccttaacattttttccttcatttcaactttggtgaatctgacaattatgtgtcttggagttgctcttctcgaggagtatctttgtggcgttctctgtatttcctgaatctgaacgttggcctgccttgctagattggggaagttctcctggataatatcctgcagagtgttttccaacttggttccattctccacatcactttcaggtacaccaatcagacgtagatttggtcttttcacatagtcccatatttcttggaggctttgctcatttctttttattcttttttctctaaacttcccttctcgcttcatttcattcatttcatcttccattgctgataccctttcttccagttgatcgcatcggctcctgaggcttctgcattcttcacgtagttctcgagccttggttttcagctccatcagctcctttaagcacttctctgtattggttattctagttatacattcttctaaatttttttcaaagttttcaacttctttgcctttggtttgaatgtcctcctgtagctcagagtaatttgatcgtctgaagccttcttctctcagctcgtcaaaatcattctccatccagctttgttctgttgctggtgaggaactgcgttcctttggaggaggagaggcgctctgcgttttagagtttccagtttttctgttctgttttttccccatctttgtggttttatctacttttggtctttgatgatggtgatgtacagatgggttttcggtgtagatgtcctttctggttgttagttttccttctaacagacaggaccctcagctgcaggtctgttggaataccctgccgtgtgaggtgtcagtgtgcccctgctggggggtgcctcccagttaggctgctcgggggtcaggagtcagggacccacttgaggaggcagtctgcccgttctcagatctccagctgcgtgctgggagaaccactgctctcttcaaagctgtcagacagggacacttaagtctgcagaggttactgctgtctttttgtttgtctgtgccctgcccccagaggtggagcctacagaggcaggcaggcctccttgagctgtggtgggctccacccagttcgagcttcccggctgctttgtttacctaagcaagcctgggcaatggcgggcgcccctcccccagcctcgttgccgccttgcagtttgatctcagactgctgtgctagcaatcagcgagattccgtgggcgtaggaccctccgagccaggtgtgggatatggtctcgtggtgcgccgtttcttaagccggtctgaaaagcgcaatattcgggtgggagtgacccgattttccaggtgcgtccgtcacccctttctttgactcggaaagggaactccctgaccccttgcgcttcccaggtgaggcaatgcctcgccctgcttcggctcgcgcacggtgcgcacacacactggcctgcgcccactgtctggcactccctagtgagatgaacccggtacctcagatggaaatgcagaaatcaccgtcttctgcgtcgctcacgctgggagctgtagaccggagctgttcctattcggccatcttggctcctccccattcttcaacattttaaacacacaatttatattatgggctgggcacgtctgtaattctagcaccttgggaggttgaggtggaaggatcacttgaggccaggagtttgagagcagcttggagaaaatagcaagaccctatctctacaactaaataaaaaattaaaaacttagctggatatgttgatgtgtacctgtagtcccacctactcaagaggctgaggtgggaggatcacttaagcctgggagatcaaggctgcagtgagctgtgattgtgccactgaactccagcttgggccacagagcaagaccttgtctcaaaaataaaataatttatattacgtatacaacaatgacaaatctgtagttttagggagtgtagctctgttgttgctcctgacttagtcatggtgatggatatcttcctgttttgcagtttgggattgtgagctcagcttctgagatcctttgtcaccaagaatcctcagtggtctggactgcaaacacggacctccacaggggttgacatttgtctctgccaggaacccaaaggtattatcagccccagatgactttacttaatttctcagcttctctcctccaggctctaaaagtagggtgaggataggatcaatttaaattcaaaacacaagtgaatcaggcctttaggagcctttctccactcccacaaagaaacgatctttctcatttttctctttgctggcaagcagagtatttttctctggaaggtcttggagggttgtggccttgttcaagaggcctcagttccaatccccaaagcctcacttgttttcttagtctcttgctctgcccttaggcagatattggggctttgcttatacttccaggctcctcacagtaaactgaccacttggggcctccctctggttgtcctagccaagggtatgttaccaattgttcgtatttctttgtctgcctctaggaataaagggcacatcagccttttccaggggtgattagcttcagttttgtttaccctcatttgagagccagcctatgttctgttctccacgcagcttaaaaaggagtcgtgaactttggatattaaaataataaataagtagtaatacctattgggctcagttttcttctctttttctctatttttgaagtctataaagtctgtatggtctataaaaccatacaggaggagaagacaggtgactgacacctatcacctctgcctgtttcatctgctaacagctctgaggaatatgcaacactttttaaatctcacttttttctttcttcctttcaaccattatctgaaagtgatcaagaacattgtagagacccatgcactgattagataaatcagattgtcccgagaaggcagaagcagtcttctgtcactcaagtgcttgtgtatgccatgaagtgcctgtgtcctttcttgcccaggaaataaaattatagacatacaaaagatcctgatggttccagagggagcagcatgtctaatgaagagatagacaatctagttttccttttcttgtatttattggtcatctcttatgtgacaggaaatgtgctaaatgctatggctgcaatcataaatgagacatttctttccctcaaagaggtcaatgtctggtagaggaggaatgcacataaacacaagtcatacaaagtaagctttgtgagaaggaaggtgtttctgagatccgcagaagagtttctggaggagacaaaacctgaaataaatcttcaaaaataactgagagtcagtccatttctttacttaatatgtatttattaattattgattatgtgctgaatattaggataggtccttgacatacatctgttaatgacaaaggcatagttcccatcattatgggctggcatgctttgcccataatgatgtgctgtgcttagcagaaatagtacagctaagtgtgtctgaagagctttcagttatgttacttttgattggtcattctttcttgggcctctgtttcctttcaagatgtcaatatcctcccttttctaaacttagtcaactttggactggtgtggagaagccatctctgttggaaggcaggcacccatcagccatcgtactaagggctgggaataagaccaggagattggttatgattctttccagtattgttcattaagctcatttccatggtatgctcagcattgctctctccacatctttgcctcatttagacaataattgcaaacattcccattgactttattggaatcttctacttatcgtctcttatagaagtagagatactataggtggagacaggaaactgaggctcagaaatgacatatctgacatagccataggtgctcatagatggggtttgttataattctttggggggttcacataacagagagagctactatgttctctgccaaatgaactgtaagtaaccctggtgagagtagacttatgctatagacatgaatgagtgaatacaaagctagaaggtcgcatttctctttttgttagattctatggtttggttggatttagttcactctctaaaattgctcagattataaacttaaatgtagggtcgggcacagtggctcacacctgtaatccaagcactatgagaagctgaggcgggcaggttgcttaaggtcaggagttcaagaccagcctggccaacatggtgaaaccccatctctactaaaaatacaaaataattagctggcatgatggtatgcatctgtagtcccagacacttgcgaggctgaggtaggagagtttcttgaacccgggaggtggaggttgcagtgagctgggatcatgccactacactccatcttgggcaacagagtgagattccatctaaacacacacacacacacacacacacacacacacacacaaaaaaaaaaaaaaaaactaaacttgaacataaaactaaaaaacttttgaagaactgtagaagaaaatcttcagtgtctatgatttggcaacgagtttttagacttgataccaaaagcacaattcataaaagtacttactgacaattcaaatatcatcataattaaatacttttggtctgtaaaataactctgttaagagaatgaaaaggcaagctacagactgggagaaaatatttgcaaatttgtaagccatttatccaacaaataactagaatatagaatatataaagaactcttaaaactcaacagtaaaaaattagaaatttaattagaaaatttaatttaattagatttaattagaaaatgggcaaatgatataaacagacacatcacagaagaggtatagagatggcaagctcatgaaactagcagaatggctgaattaaaataatagtgataacaccaaatgtggagcaactaaggcactcaaacattgctgtaggaatgttaaatagtagagccgctataaaaaacactatagaaaagcagtttggcagcttctttaaaaactatacataggcttacctgcaacccagcaattgcattcctgaatatatttatcctggagaaatgaagacttgtactgaccaaaacaaacaaagaaacaaacaaacaaaaaaccctattgttttgttaatttattcatagaagcccaaaactggaaataactcagacgcccttctatgagggaagggttgaacaaactctgatttattcataccatgtaatagcactcagcagttcaaaggaatgaactattgatacacatagcaaccttgatgaatgttcagagaattacaccgagtaaaaggttccatactgtatgattacatggtggtggacacatgaccttacaccggtgataaagtgttacttagaactggctgggtgcagtggctcatacctgtaatcccagcactttgggaagctaaggtgggaggattgcttaagcccagaagttcaagaccagctgggcaacatggtgagatcccatctctacaaaaaaaaaaaataaaataaaaaataaaaaaaataaaaaaataaaaaaaaacttttttaaaaaattagccaggcatggtggcatgcaactgtgattccagctgcttgggaggctgaagcaggaggatcacttggactcaggaagttgaggctgcagtgagccatgcttgtaccactacactccaggcggagagacagagcaagaccgtgtctcaaaaaataaagtaaaataaaattacatagcactaaatacacatatacaagtaaaagtaaaactggggaaataagaataagatcagtggtctgtatcaatgtcaatatcctagttgtgatattacgttacagttttgcaagaagttatcattaaggacaagggggtaaagggtacataggaatctctttgcatgagaatctacaattacatacaaaacatttgtcttaagtttagttttaaaaatatttgaggaaaagcagcaggactgttctagcttaagttggtgcatgtcctgagctgacattttgagcccatctatgagactgtcatcctctgcctgtaagcccatctgcctcccactgctcctgggaaacactgggcccatgtaaatgtttagcctgaggcatagatgcaaaccctgaagctgaatctactgcagacttctttccctacagccagcattctggccaactgcctcgcactcatggctttgggcttgcagggcatgcttatgcactgcacctgtgcacgcttctttcagactaggggacaagatgctggaagcaggtttcctggtcaaaaatggtaaccacgtgttctgttcacccagggtcatcaatcgtgaagcccaaggtagaacccgcatttctccactggggtttgtctctcctgctctctctatggttagtgttatttttaatgagcagcctgaatttagagctagctgtttgaggatccaattcccaagaaatgcagcagtattagtgcatctaggctttgagtagaaaaacctgcaggaggagcttgaacaagttagttaaccacgctgagcctccatctcccatctgtgaggcatgataacactagtttcaacaggttgtggtgggggttaaattagataatgccttgtccatgtattagtcagctcaggctgccatcacaaaacgctatagtctaggtgacttaaacaacagaaatttatttctacagctctgggggctggaaagtccaagatcaaggccgtgctgctttggtttctgatgagggcccccttcctggcctacagatggccatcttctccctgtgtccttacattgtctttcctctgcatgtgcatagagagagtatctctctcttcctctttttttaaatttaatttaatttaatttttaagagataggatactgtcacccaggctggagtgcagtgggcatgatcatggctcatggcagcctcaacctcccagcatcaagcaattctcctacctcagcctccctagtagctgagaccacagttgtgtgccatggcacctggctaattttttagtggttttttttttttttttggtagagatggggtctcactatgttgcccaggctggtctcaaactcctcggctcaagtgatcctcctgtctcagcctcctaaagtgctgggattaaaggggtgaaccaccacactgggctttcctcttcttatggagccatcagtcttattagattagggacctacccttatgacctcatttagccttaattacctcctaaaagccatatctccaaatacagttaccttggacattaggtcttcaacatatgaatgtggagagggggagacaactcagtccatagcagtccacttagagcaattatctcacatatagtaaatatttagaatatagaattcttaaaattatgttatttttgttaacactctaattgtaaatgatagacataaggtgaattactctagcttaagcaaaaagaaaacttttatacaaaaaatgcaatgttgtctttcaaatcaagattgagaatgagacttggtttcaggaagtttctgaaaatttaaaactgaaaacgtatcaagagcctagagtgaagtctccttccacctctcaccatctcctcacagcttctgtggactggttttctctacccttctgggcttgtaaaggagcaacacctgccactccacacctcccatggtgccatgtcttctgtgcagaagaccatttcacacttactcacttgcaaacctaattcagaatcgccaagagaggaagtgggttactgcccctgggtcagaagtccatgcttagtctaaccaccaatggttaaagacgatagcctccaggggcccaggcacccgctgttataggagggaagcaatttgagacaaagtgggtaattgttatgctggataatcaccccatacagtgtctagtatgtttttcatactgctgccaaccctgtttcacagggtgcctatttgagttgtaaatgtgaacccctgatactggtgaaaagttatattatcttgacctgactccacccatttggggatcaccattttcctttcaaagtgatcacaggggtccttgggtacataatcctccttccctacctcctctgccatcctcctcttccttttttttttttttttttttttttttgagatggagtctcgctctcattgccaaggctggagtgcagtggcgtgatctcggctcactgcaatttccacctcttaggttcaagctattctcctgcctcccgctcctgagtagctgggattacaggcactctccaccatgccaggctaatttttgcacttttagtagagacggggtttcaccatgttggccaggctggtctcgaactcctgacctcaggtgatccgcctgccttggcctcccaaagagctggaattacaggcacaaagtgctgggattacaggtgccactgcaccctgctcctcctctgctgctgctgtgtggccgtctggatgggatttgctacccaggcttttaaaaccccacaagttcccacaagtgaaattgttccagaatgtgctgggaaggcatttccagccagttctacaccactgtggggccaggtcctagtggctccaaatctgtcacttgggctagagctccagggggtcacattgtcacctcaaagaattcccagctgaaggggtctggccttttaggcaacaaaagcagtaatcccctttccccacccctacagttcattttatgcctcagtttcctccatatcagtgctacctttggctaatattgatccagaggttcagagtggcaaggatgatatcctattctctctttattgcctcctgtattgaagtgcaaaggatcacacttagccagagacaatctgtatcaatacaaagtaaaatcctagtggagcatgctggctgcatctctcctttttgccatcattgaaaactgctgactggccatatgcaggtgcatagatcttaattaggctctgcaggatgagaggaaggagacatcctgcttggagaagaatcagtagtgtcataaatctctgcagaacaattaggagcccaagaaccagagggcatggggaggagtcacattgtatcatttttctatttattttctgctcaaccatcttccttacagcatctttgagatgttcagttattgctgactacctggaacagttacacccctcaattctgtttaattgaatattgaaaacatttacaataaaagctcttctaaacttattctatttagctgacttccctgattaaccaatacagcccaatagccctgtaaaacattctagcataaagctgtcagtgggtgagtttgccttagccagtgggatgctttacagctctccacaggtctgcctcatgctaagagtccctgtagttctctgaaaactgtttcaaaagccaaagatatattagggaagaaagagataatactatttctatgaaaactacaataaaaaactttgctcctttcaaaggctttgaaaaaaaaaagatagattgccttaaaaatcgctggacaattatgtgtggaccttatacctggaaaaaaagcttgaggcaaggtcataaaaatctagaagatatctgcattgagaatgcagtcaaatgtcttcttttttttttttcctgagacagagtctcgctctgtcgcccaggctggagtgcaatggtgccatctctgctcactgcaacctcgcctcctaggctcaagcaattctcctgcctcaccttcccgagtagctgggattacaggcgcccaccaccatgcccagctaatttttgtatttttagtagagatgggtttcaccatgttggccaggctggttttgaactcttgacctcacatgatgcaactgcctcggcctcccaaagtgctgggattacaggcatgaaccactgtgcccagctggtcaaatgtcttaaactctccccactctagtagagacattttatggttctggtttacactagttaaggtagaactctcgaaaataaaccattgtcaaagaagcaccctttgtctacctcagagttcctaaatacatgtatgattatattcatatttatgtaatttaaaataaaattctcaagctacataggtaatttaaagaaatattccctattttctatttttcctttacctaatgaacccctggtttcaatcacttgtatcagagagttctgggccatttcctttatttgtagcattaatctgagagacttcatgaaacagcagttaagagcagaagctctgtggtgtgaacagggcatgttatttgaatcctctaactctcagttgcttcatctctaaagcgggtataatacatgcctcacaaaggtggttgagagttagataaaataatttctgtaaagtgcttagcacattacctagcacacattcagcatttagtaaatgccagtaacaataaaaatgatattgatgaattaataaacagttactaatttcctggtactgttccagatgctgaagtcacacgatgagtaagcacagtccccaccccacaaaactcacagtccagcaggaagaagagaggcgacagatcgtctcagtggatgtattcattcaatactatttgttgagcttctaacctgcatcaataaattactgtaaaaattcctataatgataaaaacatgtccctgctatcataaaggctaaagtctattggagaaaaatagttactaaataaaattcatacagtgtgcaattgatgaaatttactgtccactgggggagggcgtgtgccaggatgggattccctgaggagtacatctggagctgagaattggagtttgctggagtgttcactgaatgaggggtgggaggagagccagcattcatactgaaagagaaacccactggcaggaggacacagggtgagcgttttgacagagatcctgtgggtgacatggggaagggaaggaatacatttatctgtgtttgggaaagtggaatgactcaggaaggcttcacagattatgtgcctggattatgaagaacaatatgttttctcaacaggcaaggtaagaagagctgtccaagaaaggtaagctgtgtctacaaatgttggagtcaaggttggtgagacaactggggagggatagctaggacctggccagcaaagcccagggcactcaatggagaggaggaaattaactggaaaggtaatgccataatctggggaacaggaaatgaggtcctggcctggggcatgtccagagaagaagaggcagggccattgcgcttcctctgggtttcatagggatgcagcaatggacggggtcattggcctgcaacagcctggcccttggatgggaccatacaaggctgactgcaagggaaacatgaacacatttcccggtgagtagagaagtaaatcaaattatttctatgaacaggaattgctagaggcttcatggaacaagtgggatgtaagatgcatcttcaagagtgagtgacattttggcatggcatttgagaggtgacaatccagaggctatgagcaacagccccagatgggaaagcaccaaggagtgaagaagcttacgagcaaaaagtatttcttagttttgcagtttctaaatgtatctatgttctgcccctttaatctctaacaatatgattttgaactaattaatataaaattaatccatacattagctaaagtagataatgacttaatgacttccacatcccaggcaataaacttttgaaaatgcttctagcccgccacataaaaatctggcaaaatcagtgaaagagaatttcaaggactgtttttcttttaatttatatctcaaagtaatggtgtaccagggaaaatgtccagattctagttctgcactacttcagatcagagatttgcagtagggagatttggctccccagggggcatctggcaatgtctggagacatttcgggttgtcacaactggtggggggtgctacaggcattaagtgggcataggctggggatgcggctgcatagaacagctcccacaacagaattattcagccaaagaattatcaatagtgccaaggttaatgcaccttgttttacaccaagaaataacctttaagactgaccttctcaaatccttaattttgcagatgttatgtgtaacttccaatatatgaaataatttgcatgcagctggctaattaacagtatatggcctgggactcaggctttatagaccagtgattttctttcctgatgcattagatgtcctgtgtgttttatatcgaatggccagcatattttaatgctgtcagctcttaattccaacacagagaggagttactatatagatgccaattgcatagggaggaatatagttttgagatcgggcttctgatgatccaggaagggaagggaagtaggggttgccccatctctggggtctacagcaacatcactggagccccagatggggctgaccaggagcatcagtgtgtgaagaccagtccatgatgctgacactctttaattatgaaaggatgaataatctagttctgcgttctttcaggagacaagggacttgtccaaagcatgaacactttataaacaatttaacaaatgtaaactgtgaaagagaaagacaaatgtgtgaatatgaaaactagggtccctgacaggcccacagcctccaaacccctcccttcacttcagaatgaaagaatccttctgtgcctgcaggggagtgggccgtggtgggaggaggctggacctggggttgcgagtctgtgaagggccctagaccctggcctgagtaatgccacttactgaccatttcaatttgggcaagacattttcattctcagggccttgaactccccacctaagaaatgatgaaacctgagtcagagcttcagtatttgagtttatctttgagatcaggtttaagatgcctcattttccaggtgaagaaattaaagtttggaaaagtcaagttatctcttgcaggccacaaaactagcaagagaacaaagggggcaattgatcagattttatgcaatatcaatgcttgggagaagaggcttgaggctttaggagcattaggggctgcaatggctttggtcccatgatcagtagcattcatttgcccatcctctctgaagttcactaaagggaccctgtgtatccctcatctggcttcctcatgcctggacccccagatgggcatcatttttaaacccatgaggcctcaggatggtggctccttctctcatcagctactccttcaacactggaagggagctcattccagacacaatcatagaaaaaatcactccagctaggaaaagccagatggacaccaagaaaaggctaatgtttcaccatggctgaaccacctcacctcacagggtgtcttgtttagggaaatgagattttcaaacaaagaatcaggagcaggtaaaagccacaaagaatcagatgagagatacactcattagcaaacttccacactgtccaattaaccgatccttctgaggcttacctgatgctaagtgctcttggataatagattggtaaaaagaaaagtcacttgtgccctagaattggtttttgtgctcccaagatgagacaagactaataaaaatggtctgcaccaccggaatcagcaaatattagaaagatcaaataaaatctttaaagtcagttgagtaggttgcaaaaattttctcccattttgtaggttgcctgttcactctgatggtagtttcttttgctgtacagaagctctttagtttaattagattccatttgtcaattttgtcttttgttgccattgcttttggtgttttagacatgaagtccttgcccatgcctatgtcctgaatggtattgcctaggttttcttctagggtttttacggttttaggtctaatagttaagtctttaatccatcttgaattgatttttgtataaggtgtaaggaagggatccagtttcagctttctacatatggctagccagttttcccagcaccatttattaaatcgggaatcctttccccattgcttgtttttctcaggtttgtcaaagatcagatggttgtagatatgcggcgttatttctgagggctctgttctgttccattgatctatatctatgttttggtaccagtaacatgctgttttggttactgtagccttgtagtatagtttgaagtcaggtagtgtgatgcctccagcattgttcttttgttttaggattgacttggcgatgcgggctcttttttggttccatgtgaactttaaagtagttttttccaattctgtgaagaaagacattggtagcttgaggggatggcattgaatctgtaaattaccttgggcagtatggccattttcacgatattgattcttcctacccatgagcatggaatgttcttccatttgtttgtatcctcttttatttccttgagcagtggtttgtagttctccttgaagaggtccttcacatcccttgcaacctgctcatctgacaaagggctaatatccagaatctacaatgaactcaaacaaatttacaagaaaaaaacaaacaaccccatcaaaaagtgggcaaaggacatgaacagacacttctcaaaagaagacatttatgcagccaaaaaacacatgaaaaaatgctcatcatcactggccatcagagaaatgcaaatcaaaaccacaatgagataccatctcacaccagttagaatggcgatcattcaaaagtcaggaaacaacaggtgctggagaggatgtggagaaataggaacacttttacactgttggtgggactgtaaactagttcaaccattgtggaagacagtgtggcgattcctcagggatctagaactagaaataccatttgacccagccatcccattactgggtatatacccaaaggactataaatcatgctgctataaagacacatgcacacgtatgtttattgcagcactattcacaatggcaaagacttggaaccaacccaaatgtccaacaatgatagactggattaagaaaatgtggcacatatacaccatggaatactatgcagccataaaaatgatgagttcatgtcctttgtagggacatggatgaaattggaaatcatcattctcagtaaactatcgcaagaacaaaaaaccaaacactgcatattctcactcataggtgggaattgaacaatgagatcacatggacacaggaaggggaacatcacactctggggactgttgtgggttggggggaggggggagggatagcattgggagatatacctaatgctagatgacgagttagtgggtgcagcgcaccagcgtggcacatgtatacatttgtaactaacctgcacaatgtgcacatgtagcctaaaacttaaagtataataataaaagaaaaaaaaaatctctaaagtcattgaaatgccctgcttctgtggtaaattagggctgaatccttcgaaatccttaagcctgaggctggcaggctgttcaatcacattatgtgctgctttggaaatatccctacagtttggtaggcaagaggccatacacagtgaggcctgttgggagaaaacacaacaaaaatgtgttgtcaggttggttttaattggtgatctgagatacaaactctcactgggtaaggtgaatttgagctttaagctttatctcctgttcacgttttgctctttgcaatttgatgtacaatatgaacaattcaaatcatttcctgggagtaactggcaaacacttggcctcagagaagcagcatgacccttcgttgcctgtgcagtgagaggggtggcctgcatgaccttggaactccaacttagcttccagtgttttataattaatcagaggaatatataaattctgatttagtcaatactgatttaggaactataaaactgcaccactttaaaagtctgtacaggcatgccttctgcaaaagtctgaaccatatttagtttttcttgattaaaaaatatcttgcttaattttgctgattttctttcaaagaaagcatgaaaaaatataattgtctcattcatttttttcagctattttattcaacaaagatctacagagcatctgaaaagcagcacagttctgccacaatggggctcaagtttaagtgactgcaaagtccaggattcttaaagcttaaatattaacacacagttccagacttgcaatgccccagaggcacaggataaacatgccctcaaatcttctctggcaggggacaccctcaatccactttattcaggattcacaaaggtggaatcagagtgaatgagctcaaaattaaaaattaaagcacaaacaaaaatataagccattgacagtgagattagcagaaatacaaagcaaacaaacaagatatttaaactccttagaccataagataatatcaccattagagatttaaaaataaatatatttttaaaattttaaagtatgaaagacactaaaaagtgagatacaatcgagagcttatcatgaaaggccagatatttttgtaaaagaaccaaatagaactcccagaagtgaaaaatgtagttattgcaattaaagtcacaatggacaaactagacagcccaaatgtacacaaaaggagaaataattgggaaactggaaggtagaactgcatgcatttacccagaatgcaacacagaaacttaacatggggaaaatggacactaaaatgagcaatccattattttaaaaaatcaaaaaaaaaaaagaaaataacaaacaaatgaacaaacaaacaaacaaaaacaggtgctggcaagattgtggagaaaagaaaacacttatacactgctggtgggaatgtaaactagtttagccactgtggaaagcagtgtaaagatttctttaaaaagttagaactctcatttgaccgagcaatcccactactggaaatatatccaaaggaaaataaattgttctaccaaaaagacacatgtagttgtatgttcactgcagcactatttacaatagcaaatatatcagaatcaaaaaagatgttcatcaatgctggataaagaaaatgtcttttacagcaacatggatgcagctggaggccattatcctaagtgaactaacgcagaacagaaaaccaaatactgcatgttctcacttatatatgggtgccaaactttgaatacacatggacacaaagatgggaaaaacagacactagggactgcttgaggcaggggggtggaggaggtgtgcattggaagattacctatccagtactatgctcattatctgggtgatgagatcattcatacaccaagcctcagcagcacacaatttactcatgtaacaaacctgcacatgtatccccagaacctaaaataaaagaagaaaaaaaaacacccaggtatatgctgcctacaagagactcaattcacattaaataaataaataaataaataaataaataaataaataaataaataaaatgagcaatctaatttacatccagcaggagtcccagaaagggcagggtaagagagatttgagagacagtcttcaaatgactgtggatttcccaagctgatgaaagacatggatgccatgtttaggaggacatcaaatcttaagcaaggattgttcagttgatgtaagatagaatggatgtgttttataggacatagatagagccttagaccaagcagagaacatacattcttcaccagcacacttggcacaaaaaatgcctgttggcccactattgaataggccaaataatcagtagcatgcagaccattgttttttatctcagtacaataaagttagaaagcagtaactataattgaatgattaaaattgtgaagatgttagtatcattaatatttttacattaaacttctcactgatagtacacaggcatctagtacataggatgcattgctgtcactcaggctcatcaaacctggctttgatatttggttattgagggaatggggcttgaaatggtttgcttcttccttcccaagtaatttcctctcattgctgtattggttaagaaactgtttatataggagtctaattaaatatacttgaatgtatataacagtccccttccttcttgctgtgttgccttaggtgagtcaattaaattctctgtactaagttttctcatttgtataatggaggtaatagtacctacctcttagcatcattaaaaatgtaaatttactaataggtgtaaaatactaagaacagtctttatcacctaattttaaaaatatgactatcaatttttagttttaaagttacactgatggatttatcctaccctgcagtcagagatttgggtgagaatgacctacagtatctggagaaggggagaagcatggtgagggtcctgggggggaccaaggttcagagggtgcatattctctgagctaagccattggaaaatctaggactttacaaaggcatgcagaggcccttcccagcaaaactccatgttaggatgcaggatagacactgggataagatgaaatcccctctaattttctccttcactgagtccttttgtagaaacaggctctgcaaacactttgtaaggttcctctagaaatggcttcagcaacttataagtcacagaatgtagaaatgtgaccatgtgtccaggtgaatcgattaaacagttcagtccccaaaacagcaaaggttgaaaggaaatgtagaaaaaggtaaagggaagaggtacattcataaagttgttgtggaagaaagtcagtgacggggaacaacaagaaggaaaattgtgttccccatgatttgttcaatttgaatcttatggtaagctgaaataatcagacacatatttattagtcaatttcaaaaataaaataaaataaaacaatacctgcgtataaagtgaaacattaaagacacagtggtcaccacaacaaaaaattctccaaattgttagttttattatctgtaaaatagaatataaaaatttactcagctggattgttttgaagaatacataagataataagtgaaatgtgtttggaatagataaatcctcagtcagtctatgtgttgcctttttaataaaaatagtatgatcatactgtttgtataaatttagatgatgcttttttcttttacaactcatgtcctacttctgttttaaaaaatacctacctaaaaatacctacttctgttttaaaaaatacctaataaactcttttaaactctgtccaatttttacttgtcctctgtacttttctcagcttcctgtccttttggctttaataggacaatacttccttggaaggaaatgattctcatttctgtcataatgtgctgcttgttctcaggcctggaggagctctgtctgagaagttaacttagccagccaggcagccaggtgtctgccccaaagacccttcttcatcttcatgaaagactgacttcatgcatgtcctattcaccacagtgcctctccctgctattggggcgtcccttgctttgaatagagggcacagacataaatgatccacaagtcactggtgtcatgtcctaatgaagagaataataacagacgattgagtgtgttctcatgcaatgatgtacatgtttatcatcacattcaatttccaaaaggctctgtgagagagacagaggaaacagtattatccaccctttaaaaaaagaataataacaaaaagatttttaaaagccagatctgaaactcagagaaggaacataacgtgccggaaatcccacagtttccgccttagctctggtgtcctgaccctagtctagctctctttttacccaaatcagagagttattttgctgagggaaactaggaaaaaatcaagtaggccaaaggtttgaattttcatatgaggatgttaggcctaatgaactttcccaaagttgcaattagcatttatacagagctccgtgttcgattctacctttccatttaaaactcatcaacccctctaagagctgagtgctgatgaatccactgtgaagatggcaagagtaggagggacctcagagcaaatccagcaccaatccctaggcagaaagctgcactaggatccaggtgctgcctcctgcaaaccgtgagcccctggaaaactcctgtaaaagactctcagaaagatttattttcctaaatctcagtttctctcatttgcagaatgggatttataaatataactaagccacagactgttttggagaccaaagaatatgtgatagaaacaaatcagtaggccaggcatgggggctcatgtctgtaatcccagcactttgggaggccaaggagggcagatcacttgaggtaaggagtttgagaccagcctggccaacatggtgaaatcctgtctctattaaaaatacaaaaattagctgggtgtggtggcgcacacctgtaatcccagttactcgggaggctgaggcacgagaatcactggaacctgagaggcagaggttgcagtgagcagagatcgcaccactgagctccagcctgggcaacagagtgagactccatctcaaaaaagaaaaaaaagaaaggaaaaaaaaatcagtaaaaacaaataaaaaagtgttctccaaaagaggctaaatggagtatttaatatgtttgaaaaatgcttacacacagtcttgtataaataatgccaaataatcccagttaatctgtgtttaacccagaaatgttgtcctttattttaccacagaacactctgcccaaagacactattattcacatccactaaaaaaatgatttggtggatcacattttgtggaacgttcttgcaaagccttaaactaaagctatattagttttctcctttctcgacgggaggccaggggccacactcaatgctgagatcccaactgtcccagcctccctgccgcccttccattctgtgggcggcgttggggtgaagaggcggccactctgctgccttgccttagggacttgccatatcttctctgggttctgacaggtataaattgtcaatcataagtcatgttaggcaaatggcataataacttgatgaactttcagcagctcccatcacctttgctgacagagaacagaggcagcattgaaagcagggagactggagctggagaatttacccaaagtgtagtcactaatgaacgatgccacctacatgctcacctggttaaaggcatgggtgttctgagctccaggacctctggagaagccttcaatatgttgccttcctggggggtcccaagaagatggccagagttccctgatgcccatcactgatttgaattgctcaattcatttaggaagaaggtgctatgcaggggaagaagcagtgaggtgtcacaaagggagcctgaatttaggagtcagggcaaaatgccccagacacagtactttctattctaattcatcctctgcttcttctcagcactaactgcaacttccgattgttttaggtttttacctattgacttcttttgtcttgttggccattggaatgaccatgtttgttttgctcacagctgtatcccatcactctattggatattatacattgtattaatatatgtatattacatagtcatttgacagtctactgcctcccctgtccccatcacatgtaagttccatgagagcaagggcttcctctgtttggctcaccacttatatttccaatctagcacagagattgacacacagtaagacttaataacccattttttaaagaatggataaattatgaataaatgaagtataaagtataatgccgataaattcacacatgcaggaaaagatggttcaaaccatcaacggccaatactgattgggcatcctatttctagaatggcattaggatttgggtttgtgattctaaccaccaccccccttcacccttcgccccccactccccaccccacatacacaattacagttttgttggaagaagaaaaaggagaaatagggaggtgtcttctaatccaagggaaaccacgcacagttcattcaataagcatttatctaatagcattatggatgcagaagtaagtaagccatgtgggcttttggtccagcaaaggatatgaatgtttctccattaattacaaggctcaagaagaaaatgatttggattgtggtactagtgggtgagggtcatgccatactacagctcagtgtgtatcttaggatgcctaacttaaatggtaccaacaactccagcacccatccagagtgcgactgttacttggcatcctggttgggacctaggtgcctgctattccttcaggaaggaaacctaagtgactccatgtgatacattgtgagggagcagagaagagtcagggagacatgaagagagaatacgtagaggccagaaacacctaaccaaggaatgacaaagcaaagcaaattccacaaaggagaggggagaaggaggctgcctccagagccagttgccatgtgtggcattgttgattaatgaatcgagctttaaattttctggcaagaaagagacaagaaatgtgatgtttacagtttcattgtgagctttcttttttgagtaaaaaaaaaaaaatcttgtgagtttggaattttaaagtgtggcaagtaatttgcttgaaattcaactccacatgtcgagagtctgattaaatctgtagctttgaccatgaccgcaaaatccagctttttattgtgccttctgctaattagaactggagattttgcattttattgctttaatcctgtggttgttctagaaacctggattatcacattgcaggggaggtgatttaaggcaaatatgtcgggtccttgttctgcttcatttaaagataagtgatgatatttttatatttttaaaaaaggaaagacagacaaacccttttttttttacctcctctggcatctgtttctcagtagggcagaggaaactttcagcatagaccacccttttgagaacatagtggtaagggttaatccatcccacagtctctgctggggctgacaatctttgccaagacttagctaggacccagcaagtcacctaaatggacaggctctgaagtgatactgccttcacagctcagagtgacaagaaatgggatttgcagtttccattagggagggataatgctctaggtgacagtccttccattcttgtctttttccaaataatgggtctttctggaagatgttggtagacccctcaacacccaagaattactcagtcaactggggacagaatgaacagattgatctgcaaagagtgtgggctatctgcagactgtggcataacccagagagagtgagcagttccccaggcagggtggggaagaaaggactgatggaggggatcagtcatcaaacagatgcttaatggaattgaataactggaatattattcagccttaaaaatggagatcttgccatttgcaacaaggatcaacctaaaggatagcatgctaaatgaaataagccagtttcagatagaaaaatattgcatgatggtatttatatgtagaatctagaaaagaaatgaaaacatagaaacagagtagagaggtggttaccagggtgtggggattgggaacaaatggggaaatatccattaaagaataaaaagttgcagttacacaggataagtaagtttagagatcaaattaaagcatgaggactatagttaataatgtattacatactgaaaatgtgctaagatagatttttggtactcttaccacaaaaaagtaactgtatgagatgatgaatatgttaatttacttgattatagtaatcacttctgaattatatgtatatcaaaacataaagttgtacaccttaaatatatacaataaaaaagatttagaaaacccaactcatgctctcttcctctgtatatattcatattttttcattatatgtggcactttctatattctcaatcaagtttattttctgaccactggctgagccagccatcacagtgtgatctttcctctctttcattcactaccatccatatcaccaagtcgacctctccagtcttcttagtccgtattttctctccatcttctacatctctactttagtaaagagttgtgttatcacatttctatgtcactgtaggatccgcttgggagctggatctctactcaggcccattttctgctattctcctcattgaaaaaagaacaatgtttctacaactcaaatctgtcaatagcctttagagaaagtgcaattacttagagctgcatacaaggttctctaaatccctggtgatttttttcattattttctttgtcacatcctctagtcacatccagcagctgccagctgaccagcagccagctcagggtaaaatcctgccaggtctgtagagttggttctacagtttaaagtgctaattacacattacacatcactgctgtgctagtagctaaccaaataaatttgcattgctgaccagtttccatcagaaaaatctagaaaaagaagatcaaattaaatagaagtagaaataaggaaaaataaaatatataaaagtgagtcaatgaaataaatcattggcaaacagagaaaaccaatgaaatcaaaagttagttatttggaaagattaataaattcgataagcttctaacaaaactgattaaaagaaattgagttacacatatgacccatatcaataatgaaaaaggggatattaccttagctcccaggacattaaaattgtaggaagaaaatattataaatacaacagtaaatataacaacttggtcaaatgaatttcttgaaagacaaaaattaacaaaaatgaccaaaagatataaaaatctgaaaagtgcaggtcataacctcatgacctcttataaacatcaataaaaacactcaaaaataacctaagaaattgatgcccacaatatataaaataatgtattatgaacaagcatgctttatcctgaaaatagaagactagttcaacatctaaaaaataaattaataaaactcaccttatcaacagattaaataagaaaaaagtgcaatcgttcaaaaagaattctttggaaaagaaatcatcattcctgatttttaaaaaaatctctcaaagtaaaagtacaaataagctttcttaacttaataaagatatagcaaaaaaaactagaatcaacatcatacttaaagacaaaagactgaatccctctaacctacaaacaaggtaactcatgactcttattcagaattattttagaggttatagccagtacaatgaagcagaaaagaaatagggaaaaatggggcctagagattggaaagaaagaaaactgtctcttctcatacataacatgattgcccatagagaaaatctcaaagaatctgaaaaataactccccaaaactaataaatgtgtttggcaaggttgcaaaatgccagatcaatatacaataaatttttgtatcctaggaatcaagcaaatggaaattgaaataaagcaatgtcatttacagtagaaccaaaatacattaaacacttacatccagttatttgaaaataccacaagatctgcgtgctgaaaactacaaaatcatggttaagaaaaatcaaagaagacctgaattaatgaggagatatactacattcagtaattagaagaaccaattttgataagatgtcaattctctttaattgacacgctcaacgttaatttttggtagaaatcaacaagctggttctgtaaccaaacccagcttttgctgctcattgcttgaaagccagacatgagagaaagtttggtggaaggaaaagcagaaaagcaggtttaagtggagagccagcaaaccaagaagatggtgaactaattttctaaaataccatcttaaattttttaatttaccataaagtttttaaaagggaaacttggtatgggaggcatgtgggaatggtgcagggtacagggtctgtgtgtctgttttaatagctattttgggtaattattcatacagaggtctaattaacgttatgttgacttcagcccaatggtggtagattaattgttcatgacttttcctaagtgagaagattctgtaagggctctgtgcctggtttgtttcaagattagcctctggaatttcttaagcaaaaacataattagataagcatgtgtttatctaattaggcaggggagtgtctagagaaggaaggaataatgggttagagaagagggaagtaagaaaaagaaagtgggtgattaaaatatgtttttaaagttgaggtccccggttacagttctaaagtatatatggaaagaaaagaaaatagaatagccaaaacaggctgagtgtgttggctcatgcctgtaatcccagcactttgggaggccgagatgggtggatcacctgaggtcaggaaatcaagagcagcctggccaacatggcgaaaccctgtctctaccaaaaatataaaaattagccgggcatagtgacaggcacctgtaatctcaactagtcgggagactgaggcaggcgaatcgcttgaaccgaggaggcagaggttgcagtgagcctaggttgtgccactgcactccagcttgggcgacagagtgatactctgtctcaaaaaaaaaaaaagaatagccaaaacaattttgacatagaacaatgttaaagaactcagcttaaatgtttttttgatttactataaatctgcagtaatcaagagagtgtagtattggagaaaggatagacatataaataaaaaattgaaatataaaatatggaaactcacaagtatacagtcaactgattttcaagaaagatgcaaaagcaatttaataaaatagccttttcaacaagtagtgttggaataattagatatctatatgaaaaataatgatcataatctataccttgcaacctctaaaaaaaagtaactcaaaattataataaacttaattgtaaaacctaaaacaataaaaaatcctggaagaaaacctaagagaaaatctgtgtgacattagattacacaaagactctttagacataacataaataacatggtccattaataacaacaacagaaacaatgaaatcagtaaaatttggtttcattaaaatgtagaacatctattttttgaaagacatttaagaaaataaaaagataactcacagatagggagaaaatatttatacattatatttatgataaaggacttgtgtccaaaatacataaagacctctcaagattcaagaaaagatagaattaaaaatagttaaaacagtttggacacaaactttgccaaaggaaatatacagatgcaaataagcacacaaaaagatattcagcataatttgcattatggaaatgcaaattaaaatcacaacaagatatacctattgaaatgcctaaagtatataaaagcaggtaatgtcaagtgctgctgaggatatggagatactggaattctcataaactactggtaagaatgcaaaatggcacagccactttgataaactatctggtagtttcttacgtagagaaatataagcgactcagcaatctcagtcctagatttttacccaagtgaaataaaaacattctcacaaaacatgcacataaaacttcgtagtaatagaatgcgtgattgcctcaaactggagacaaactaaatgtctctcaactgaagaataggtaaacaaagtgtagtatatccatacaatggaataatgccaagcaataaaagaaaaaaaagcaatacatgcaacaacatggatgcatctcaaatgctttatgttaagtgacagaagcaagattcaaaagactacatactgcataattccatttacatgacttttggagaaggcaagattacaggactggtgactggatccacagtagccaggagttaagggttggaaaggggtgactagtcagtagtacagggcaatttagggggtaaaggaactgttcaatatctcaactgtggtgttggttacatgtctgtatatgtttgccaaaacttgaagaactatacactataaaagtgaattttactaaatgtaaattatttgctattattcaatattattttttaaatgcaattaaaataaagattctaaagaaaataaatgaaatcctgataaccttttatctagtaaagggagcaaatttgcaagtaaatactttcctaccaagaaaattacgagcccagtgtcttagtcctgtagtcctataacagaatacataaaacagtatgctttttcaagaaaagaggcttatttactcacggttctgcagactgggaagttcaagggcatgtacttggcttctggcaagggcttttgtcctgcattacaacatggcaaagaaggtcaaaggtaaatcagacatgtgtgaggagggtcaaacaagaggaagaaacttgctgtataataacctgctgtcttgggaactcacctattcccagaggactaattcagtcttgggagagcaataattcactaccccaaggatagcaccaagccatttatgagggatccactctcatgacccagacacctcccatttgccccacttctaaacacccccacactgaggatcaaatttaattttagtggacacaaacaaagcatatccaaaccacagcacccagctagctttactggcgagttctaacaatttaaggaagaaattataactttcttatgcattttttaaaaattaaaaatatccaaacctccctttgttttctgcatttatcgtcttttttctaactatttgcataagatccaaaatgtgcaaataagcctttgttctctctgaacactataaaacaaggttactttagcttacaccatgtgcatttcttttgttttaaggaaaagaaatctgtatcttatacaactccagggtccctcagtactaagttttcctttccaattaatagcatgccacaagatgtttgactactttgcagctgattttgcattcacttacctctagccaattgttttaataatgatgcatcctgagtagtgtctttctccatttaggcctaaagatctctctgaggacattccctaaattcacagccccatgtatccattctgaaataaaaatgccttctctttctccagcacttcccactccctgctgatgctgaatggcttttcatggaagcacttaacagtggttgtagaaggactgccatttttttctacatgggtgagtgctctattcatcaacattctattgaccatcacattatcaagaaggccctagggtatcattacaatttgtagtctctatcctcaaatgtctatccctaaactgtctcaattctatttaaatggctatatttctatcataatttgcaaaacaaactcctatgtctaggtaacccagcgtgataggaccctgacgtgctgtggctgaataatgcccccttccccctgaaaagatatccatatcctaatctctggaactcataaattttatgttatatggtaaaatgtactttgaagatgggattaaattaaggatcttgaggagggcagattatcctggattagccaggtgagcccaaggccttacaagggtccttaaaagagggaggaaggaggagtcagtcagaggaggaggagatgtaacaatggacacagagattggagagatacacttagaaatggaagaaggagccacaagccgaggaacacaggcatccactagaagcacagaaaggcaaagaaacagatcctcccctcagggcctctaggaagaatcagccatcttgacaacctgaccctagatccatgaatctgatctctgacatcagatcttgaaacagtacacatttattctacagtttaaagtcaataaatgggtgataatttgctacaacagcaaaaggaaactaatatatgaaaatttgctgtttcattgtctaaactaacagaagcaggctctgaaggaatagaatatccatatattcccttgtagtcacatctcatggttataattgctttgtaaatttctttgtttttacatcatatggacaatttcatggcaccttttaattgttctttgtgtgtgtgtgtgtgtgtgtgtgtgtgtgtgtgtatacatacatactatatatacataaaatatatataattattatataattaattatatccagacagctaccttcaggtactccatccccatccagcttgggacttgggacaatgctattgtcactagcactgacttttttgtagtgattctgcaagtgaccactgtcatcagccactggttgcccatttctcatccaagtttttgggattactctgtttttaatcttgccttgtgatattgttttgctgtgtccccacatgaatctcatattgaattgtaacccccacaactcccacacgtcatcagggaacccagtgagaggtaactgaattatgggggcaggtctttcccgtgctgttctcatgatagtgaataagtctcacaagatctgatgattttaaaaaataggactttacctgtttttttttttttctttttcctgctgctattcatgtaagatgtgatttgctcctccttgccttctgccatggttgtgaggcctccccagccatgtggaactgtaagttcattaaacctctttcttttgtaaattgcccagtcttgggtatgtctttaacagcagcataaaaatggactaatgcagtaaattggtaccagtagaatggggcactgctgaaaagatacccgaaaatgtggaagcaactttggaactgagtaacaggaagaggttggaacagtttagagggctcagaaggagacaggaaaaagtgggaaagtttggaactgtctagagacttgttgaatggctttgaccaaaatgctgataataatatgtacagtgaaatctggcctgaggtggcttcagttggagatgaggagcttgttgggaactggagcaaagctgactcttgttacattttagcagagactggtggcattttgtccctgccctagagatttgtggaactttgaacttgagagagatgatttagggtatctcgtggaagaaatttctaagcagcaaagcattcaagatgtgacttgggtgctgtaaaaagcattcagttctataaggaagcagagcataaaagttcagaaaatttgcggactgacaatgccatagagaagaaaatcccattttctgaggaaaaattcaagctagctgcagaaatttgcataagtaatgaggagccaaatgttaattcccaagacaatggggataatgtctctaggaatgtcagaggtcttcacagtagcccttcccatcacaggcccagaggcctagaggaaaaaatagttttgtgggctgggcccagggtccctatgctgtgtgtggcctagggacttggtgccccatgtcccagccactccagccgtgactaaaatgggccaaagtactgctcaggcactgactttggaaggtacaagccccaagccttggcagcttccatgcagtgtggagcctgcaagtgcatagaagtcaaaaattgaggtttgggatcctctgcctagatttcagagggtgtatagaaatgcctgatgtccaggcagaagtctgctgtaggggcagggctctcatggagaacctctgctaagacagtgcagaagggaaatgtgtggtcagagcccccacacagagtcctttcctggggcactgcctagtggagctgtgagaagagggccaccatcctccagaccccagaatggtagatccacctacagcttgcaaattgtgcacctggaaaagccacagacactcaatgccagcccactaaagcagccaagagggagactatacccttcaaagccacaggggctaagttacctaagaccatgggaacccacctcttgcataaatgtgatctggatgtgagacctagcatcaaaggaaatcattttggggctttaagatttgactgccccattggatttcagacttgcacgaggcctgtagccccttcatttcagccaatttctcccatttggaatggctgtatttacccaatgattgtatccccactgtatctaggaagtaactaacttgcttttgattttacaggctcataggcagaagggacttgccttgtctcagatgagactttggactgtagacttttgaattaatcctgacatgagttaagactttgagggactgttgggaaatcataactggttttgatatgtgaggacataagatttggaggggccatgggtggaatgatatggtttggctttgtccccacccaaatctcatcttgaattgtaactcccacaattcccacatgtcatgggaggaacccagtaggaggtaactgaattatgggggtgggtcttttcccgaggttttaaaaaaacgggaggttcactgcacaagctctctctcttgcctgctaccatccatgtaagatgtgacttgctcctccttgccttctgccatgattgtgaggccttcccagccatgtggaactgtaagttcattaaacctctttcttttgtaaattgcccagtcttgggtatgcctttatcagcaacatgaaaatggatgaatacaccttgctttccaaagaaaacattgtttcaaccaaatcccactcctaccatcaattgttgtgaggattgtgtgtcctccttccttagttcagagtcctccaaaagaagacactgagaccaggtttcaagggtaagtagattgtcttggaggtgacgtcagaaaccactgatggagaagtgacaaatgagacagaaagggaaggaattgatgacagggaatctcaggtgaaaaaaacctcaggactatcccacccaaatagcatggaagagtgagtatcatatagcaactccctgaaagagttgtgaactcccttccatttctgccctgctggatgggaagaaaagcgggtcctggtagctaaggaaatccctcaggcaagaagatatgtgtgctgccaactggaagttgggccagagaacatggaagtggtgaaggcagggcatagacagcatccacagctcatatccagtcattctctcaaagggacttccatcacaagatcttatctagtgcagtttattagaaaagcatatgaaaaggctttcaaattattaataagaattcttatagaaatgttcatctgtgtcaggcaccatatttctggctgggtgaacatagatgtcctttactatcaaattccatggggcccatgagaagagaatgcaggaccagccagatggctcatgcccattgccatttttactttgcttctatgttacaagctgacaattttgctctgtgtgtactgtaaaatagcagacattttccaaattttgctctggcttacactgttcctttttgctttttcatttatctttcttgtacccatagttaaaaaaaaaaaaagcatttcacagaggtaaggttaaggctagaggcttatgtggtcagaacatttgagctcttcttgtaaaggttcaagtgaaccttgtccttccccatctctgcttcctcaggaatgagttttcaaatatttcattccatttcactaaaatctagcaaggctgggtcaagggccaaatatctttgttctaattcccgctctgcaaatgagtacgcaagtctcccccacctgctgacagagtcatcatatagcacagtggcaatggctggccatagacattatcacagatatcacattggaaatatttgtgaatgacaatgggtcagatgcctcagataaagctatcgcaaaagatgtaatcactgtagctattagactgacagaagaaaatctatcagagcaattccaaggatgcaactgtgaaggataagttgttcttctgggaatgtgagtgtcccttgcaggaacactgatggagaatctcaaagccctgaagcccttaggggattcaaaggtttgagttggcttcagcagcagcaccacagggtaggcagatgtgggaggatggaagttcttcctgggagcaagtgaacaggggtgaacaatttcagaactacagtctgagatctcactgaaaaagccattcatccagaagacaggaaatcaagaacaggtctaggatacagaaaaactggggtcagttggtaaagatggtggccatagcccttaatcctctgatcctatttttcacatatttttcaatgttgagctttgtttcatttataactttttttttttaagatacaggtaaggggctcactctctcacccagattggaatgcagtagtgtgatctcagctcactgagcctcgacctcctaggctcaagcaatcctcccacttcagcatcctgagtaactgggactacatgcacgcaccattacacctggttaatttttatatttttttttatagagacgggactttgccatgttgcctgggctggtctgaaactcctggcctgaagtgacccacttgcctcagcctcccaaagtggtgggattataggcttgagccactacacccggcccacaactaacctttcttgagcactacctaggtgtagggaccagtctcaatgctttgcttgcattaatacatgtaatcctcactatgctatgattctggtattattatcatcccattttacaaatgagaaaaattggatgcaattaaggttgtaaatctttcccaatgagtgaatgggcaaacaaggaggagaatgcaggccatttgtattgaattgtaccatgtgcttcctccatgcaggcaggtggaaggggacgaatagaaagggaagcaggaggatgtgtggtgctatgggcacctttgcatgggaacagagcatcttgagtgggtggtttcaactcagaaaaggaaggcaggctacatgggaggataagaagaattgataagagagacaactcagtacttcactgtaggtgaagaaaaggaagagtggctgaactcagagtagtggcagagcaatgaggagagaaagtttggagagaagggatcctgtgtcttagggagaaagaatttaaggaatttgatgactaggaggtgattccacccacccctgaccagacgtccactgccactctctggtggtacctggttgtgttaattcttcccagtgggaaaacctgtagagtgctgccttctctgtgggtgtgctggctctgatcactgcctcctctcttcctgcagctcatggggacccagctgtgatggcagtgctgatccacaacccaacagtatgggctttctccacccacactctttctgggtaattgctagggaagattcacatcacttcaggattcttcaatggacccacttaaacatgagttaagtaactacctatggaagcattcatttgttgtgtgcttcctggatatcaggcaccatgactagcactgtgcaggccctctcttgcttcttaattctcacagcaaaccttaaaaaagtatattacaatccctgtattgataatgaagaaaccaagatgcagagaggttaaatagttattcatctgtcattcagcttggaagtgccagagaggcaatgattgacttgtgtctagagcctactacctggaaggccagaccaaaccccctgtgtcaccagcaactcatgccttgcacaccatgcaccaagaagtgtatccttcatccatctgttcatattaattccatattttctgacttcttctctgggaagaacctgtactaggccctggagaatcaaagatgaaagagatacagctccacttatgaatggcatgaggatctctgatgttcaaagagtggacaagaaaaagaaacctaagaggcttggaagagagtgagtgatcggagaggttggaggttgactagaatcatggcttcagctcattctagaaaattatttttctaatgataaaatagagaagcaaaaatgatttgggaaaatataaatttagcttacaattccaagaggccataataaggcattcagggtttataaatgatattacaggagaccaagattaggtttatgttctgacccaccactacccacccagttcctttacaacccccagctatctcttagaaaaacacgactcataagccagttggctctcagctctcatttggtgcctggaatcagaatttcaacatgaatatgaaagctcaaaggaattccatttgacatcacacctatcaatttgaggtttatttgcctgaaggcctatgacagatatagctatctcaattgggttctgtgctttcatgagagagtttcggcgagaaatgctattttaagcaccatttaggctttgctgagactgtttttatggggaaagttatgactcttggtaattgctagagtttacttttagagcctcctcctcagacatcaatgtgagcttctttgcctttctgcacaatcctatcgtggttgctgttgcatggcatcgcctctaggtctttaggctgatgttatttataagctaatgacagagcaataaatattgtagtaaatagttgtggggtgtcatttgctgaaccgaagttataggcagctggagagtctttccttgtgaaattctttctccattcttcctattacaatggcctacagcatagatcaaaatacatctgccaccccctccccaaatgcattgacatttccttataagatcaatatacctttcagtggaaaccactgtatatgcattgtgtcctacaagaatcccttggcaatttctatgtgaaatccaggggaacgtgtgcatattctgaatgggtacatttctaattttttgcataggttcaatgagctacatttattaatgtctactgtgtgtgcatatatatatatatttatatatatatatataaatatatatatatatatgagacattcttctggttgatgcttaaaatgatgcaatacctttctttataaagctcacattttagagagaaggaagagcacatacaagcaattaaacacatgtaaaaagtaacaagggcttttaaaaagtgtagagaaagtggcataagagattaagaaattattttttaactctctaggacagggaaatactgctgaaggggaccacatgtatcttatgtcttgactgatgtgtaggatttagcctctccctctgatgactatagattttcaacttctgactggtatctacactgctactttcattggatcctcatttcttttgtttctccagcatttaactttaagaggtatcatcctctccagaaaccctccgctggtagctccaggcttggtcacttacctctattgtgcttctacaacaggcataatctatgtattttctatttgtattatttaaatattatttaaatatttatatatatataatatataaataatttttttttttttttttttttttttagggacaacatcttactcttttgccctggctggagtgcagtggtgtgatcatggctcactgttgccttgaactcctaagctcaagaaatcttcctgtcttagcagcctgagtagctgggaccataggtacatgccatcatacctggctcatcttttatttttatttttgtaaagatagagtctcgctatgttgcccatgatggtctcaagctcctggcctcaacaattctcctgccttggactcccaaagcactgggattacaagcataagccactgtgtacagccctgtatctgtacattttcacattgcctggtaatatgcgtgtcttaccccccagttgtaaatcttttaaaatatagacagtatctcattgttgctcattgttgctcctgtagcagtacctatctcatcacatggtgattaatataaataatcaatgtgtaatcagtatggctggatggttaagtgactgaatggaaatgaagggcattccaagtggatggatctataggagcaaaggccttcaagcggaagtttaagatatgtgaaaaaaaaatactaggagacaaggtcctaaaggaaaattagtgctatatcctagggatgtcaggctgagaattagaaaatatatcttggacacaataggcaatcatcgatcaacagaatattcctgtggttatactgcattcaccctttttttttttttttaagagaagacctacctctatatttgctggatataggattcaaaagagaactcgcaacctttgcacatgatcttatctccttgctacagcaattgttcaaagggtggacactgaactaaccagagaatgctgccttcttgtttatccaaggatgttgttgggctcagaaaataatatcccaaatggtgctttggcatgctgagcactttgaattttgaattaaaggaaattggaaggccttagaagctgcctcaaaatcaaaatctttctgacctttccttgtttctgtccccaagtgtggggaggggctctctctgagttcctttatctgactcagaagtacttccaaaagaaacataattgccttcaatctcctgtctgaaatctcattaactaggaaagattaatcactgaagaagaaactaaaggttatgccacactccctttaacagacttttcatctattcttctgagggtggctatctgaaagactttatctgcataagaaaacctttgttggccgtgcagttctgcccctcaccttcccataacttcttgccacctcccccagagtccagaggaaatttgtcccaggctattgcctgttattgaggctcattcatctcccctaaatattatttactctttctttaaaagtgcttacacctcccacttttctctcccctatgaagaggtatttaagcttcaagcatctggcctcctcctttgaatttcaagctaagtgtgactcccatgggctttcacattaataaatttgaacatttttctcctgttaatctgtctgttgctagtttattttagcagatgtagagatgaaagccttcagaaagcaatgttagaattccttttgtgcctacgatgtgcacataaccaaactcaggtcaatcaagggacttctctgggataattttctaacctgcaccaggaaaagaagtgtctttccctataagggtatatgctgtcattggctaggttccccatcatggacaaaaagtgggtctaaagttaaagaaactcaatgcaacatgcaaagaagaacaaagataagaaggagcaagagaagtacttggtgcctgttgtcaggctactgcccttttacccaggtaggccagttgaatctgggcctctataacctacaatcaggtacttgtgattgcatagcttctttctcattgcaacagcaccctggactttaaggagagtccaggaatgactctctggctcaacaacacatgtctcatcactacatgctgcccagagatttatttcaaaagggagactataataccaaggggagcttcccctaagagtcatcaacatgaagcccatcatgtctatgtccccatttattctctttttaaatgctaaacttctttaaatagttataaatagaagatttcaaacaggagagatgatatacagatacagagataaactaaaccagattaggtgtttaaaagatgtaataaaatagcatccttttcaccagatttttgaagacagtgacaaggggtgttgggaactgtgcattagaagtataacgctatagaaagacttttgtatctatttcagaatttttgctatgtaatacaataacagtaagaaaagaagcaagagctagctgagagacctaattttaaaaaaagacatttcagacttctcttggcacgaatttgcatcttattaacatcgagctgataagaggtcttattttcacatttattgcagaaagaattatctcttttcaatgatacttgagtccaatattatacacatagcacatgaaatgcagatgaagtttcaagcccatcatatccaaggtttgacaagaataagtgagatgacaacaattaaacataatttctgaagccacagaccaagtgtcatttaatttatgtagtcttcccaagtaaccctggaagaattaatcacttcctctttctggtccaataacatttttgaacacacttttatatataaggtagactgtgttagaagcagcatagagtcacaagttgaaataccattgttgtttccttcactgcaaaatggatatattgtagaatatgcaatctacaatttgagagagaaaaaaacaagaaaaaaatgcaatataaggtaattatcaaaatttctggcattaagtaaattctcctaaattagtcagtataatagttccctttttttggttcagatacaaaagttggccagccctctcctgcccaccaacatatcactccaaaataaccacagtgataatgactaggtgtctatttttaattttttcaaagaaaataggtgatgagaaatgaaccctatcctatttgaggagactctcgacaggtgaccagactttaacctaactgcatgattatctaaatacagagataacataaataaatagcaagaaacagcatacccatcaacaactgtcgttttgctttcttcttctatatggttatggaacatgtgttgttctccacattatggtgcaaggtacttattgtgatgccactttcaatgccaaactatagtagtgtgttcagaatttaatgcaaatgaaaatataaaagtagtattataaacagtttatgtggatgaatgcagctattttttcctaaactgaatgtggctctttcctaaactgattattgtgagttttctgactttcttctatagtctatcttcttaaatattatatcagctatcagttacttctcaaagtctatctgctttaatcaattctgaacatgttattactatcttaaagcaagaatacataagatctaaatgaagcctggaaaatgcatttatccaaaaaaatgtgaatgtagtgcaagcattttttgatgtgtattttggcttttgcttaccacttctgctttaaataattgacgttgacttaaacacttctgataagatgtcctacatgcttataatctatttgtcatatatactttttaggatgatataaagtacatgaagcaaaaagatgacatcatctaatcgtgttactgtgagcagagaagaattcaaattcaggcatccagggtaaccaattttatgggacacatgtgactcagccttagcctccttctctacaattacatttccccacctgggatttcacagatcagcagtaaacaaactccaagtttcatttccgtaaagtgacagaagatgggtcccctgagtgaagacggccttctacccttcatctgagaaatttaaaccagtagatttgataataaatgttaagggtattcaattaacatacaaagtggcagctggaaagggcaccgcagacagatgtctggctagagtcagttctgtgcccaggagagacaaagtagctaataaatgctgttctctatttatgtgttgacttctgagacactccactttgagtgttttcttggtaaagagttcatctgatctcaagaacccaccccccaaggagggaaagtccattgtctttgccttagattggcaggtagagtaaatgaaaaattaagaaattatgtgaattcccccaaagagaagagaagggctagagtgactattttatgttacgtggagatgagggtgtgcttattctttcagctgacataatctattaacatatgtaaaatgcttataaagagtctccagcacatgttaagtgctgaataacacagccaccaccaccaccagcatcacatactattgacaggcattgtactaacttcctgggattcaaacattaaacatacatattaaacatatgtacaaataaaacacctctatgtgttcaaaaaatacacgtatacaaatgaataagtccaatagacttctgtgaaaagtgaatctacaaagactcacataaaatcatggttatggctggtagactagcaggttaagtgaaggaggtcttcaaggaagagttagcacaatctaggaactgttcaccaagcaggtaagagaaaaagaccttcacaaacacggaagaaacaaacacaccctggtaaacttggggaattataagaagcccagtttgactgttgactctgatgtgatgagttaagggaaagaaatgaggctaggaggaggtaaacttgtgggctcactttgtggaagtctttgctgccctactaaggaattggagctgtatgtcatagaaatccatttgacaatttcaagggggccatgttacaggatctctaaagatagcatgcccttcaatttgcaaaaacacatgccatttaaactccctgtgctgacttcctcactaatagagtgaaggttattatggatggaaggagtaacatgatagaagcaaaagcaacgctaaaacattacagggatgtatgatatactagtttattttcacactactataaagaactacctgagactgggtacgttataaagaaaagaggtttaattgactcacagttccacatagctggggaggcctcaggaaacttacaatcatggagaaaggccaaggggaagaaaggcatgtcttacatggcagccagggagagagagcaaggatgaaatcatcaaatctagtgagaactcactatcccgagaacagctgagggaaatccaaccccaatgatccagtcatctcccaacaggtccctcccctgacacatgtggattaaaattctacatgagatttgggtggggacaaagaaccaaaccgtatcaagggaaatcacagaattttgtgttgtcatcaaaaatttgaaaaaagcagggtggaggtgagtcttatcacatctccatttaacttgcctgtctgattcttatagaagttggatgggtttcagacacagccaatggattattgcaaacaaaacagagttgactccaaaattgctatagctattccagctgtagtcattttactggatcaaataaacacagcttaggaacgtagtatggaattactcaaaaaaattatttacttctatcccagggatccacaagcaatacccatgggtaaaatctgatcctcagtttttataaataaagttttattggaacacaatcatgcccattccctaacatattgcctatggctacttttatgccacagtgacagagttgaatagctgcaagaaagattgtggctcacaaagcttaaactatttagtatctagctctttttagaaaaagtttgttgacacctgccctatcataatgaagacgagaagcaggctgctttcacgtagcataaacatcagtatacctctcctgaaactatcccaggccatgataactcttatgtgctcttcaaaactcagtccacagaattttgatcattttaatatgccacagaacatcttactggtccacatacacatttggtttcttgctgataggatctggtgatcagaaaatagaaagtgcctctgaaagagaaaacctgcatgatcttgcttgtttatagattataagtgtcaaactcttataagcaagttgaatggtggttactagaggctgggctaggggtggaggggaagaccggggagatgttagtccaagaatacaatatttcagatcaaccagagaaaaaggttcaggataactatattatacaatacagggactatggttaataataataatgtaacatacttgaaaattgtgaagagagtagactttaagtgttttcaccataaaaaacatttttaaggtaatggatatgttaatgagtttgatttagtcattacacaatgtatacacttatcaaaacattatattgtatgccataaatgtatacaacttttgtcaattaaaaaataacaaagtagaaaatgccctaaatatattgtaaagtaagacataaatgctagagggaaatacaccccttaaaaataaccatgctaatgatgatctgacctatttactgagtaactataaggctgtcaggtttatggtggggctgtcatgaagactctccagctgggacactctgctgttcaagcagctgccttttgatccaccagatccaatggtgctcaaagtgtcagtgacaggttaataaatatatgaagtctattgcaaactacaataggataattaatagtacgtgcctagacttttataaaaagccaagccctttaggcaaccaacaattctcttgttgataaaaatgtctgaacttattaccagaccctggtagaatcacaaaaccataaacttgcatgtgccattattatttgtttctttctctatcctgctgtctggaaatcggatacaaactggaatgtcacatgccagggacgatgaaggggtaagtttaaaggcacttggatctatgtgggcttcatggagtagagaagccttacaagaccctgcactacaaaaccccaaatgaagattctgttgctctctggggtaacacactttagtacagagaaatatgaaattattgccttaaatctagaaagggctagaaaagagtaatgtgtgccctttatagaacagaggaaaatctgaggaattttcatttacagaatatgtgttaaaagaacacaggctttgcagttttacagattcagactccaatcctctgtgtgctacttgacaactttatgggcttgagaaactcacttaacttctctacgtatgaatttccttatttaccagatacagaaaatagctaccttataagattcttgtgagaactaaatgataacctatatgcaaagtatagtagggtttctttcatttaataacaaatgagagttgccatctctccatctctgtccctatatacctccccacaaaaactaacaaccaccaaccaaacaaaccaacgaaccatctctctgagtgggcagttataatactttagtaattgtaagatggataccagaatcacagctaccagagatgtaaaatttaaatcatgggtgagaaatggagggagagtagcatagagatataggtttgtaaaacatgatctagatctaaaatgatctggagtgtgacttctagaaatgtacataaacatcatacttgaagttccataattttataaagaggacattatcaggtcatttgctatgtcattttattgtaaaacacaacttacatatatttctttaacttataacagtgtaatagctcagacatgacagttatctcagataaatggaacatataaaatgcaacagcagtttatgagattggcgttaagcacatatttgaaaagcaggggaagacaagtcacatattggagaacttatgatctgtcctatatttgttttatacaactgaggaaagaggccgtttcaaaattggctgaacatctagaccataggtgtggtaactgttcatggtaaatagtagcctatccttgagttatcacttggacaataaaaataagtggagaaagagctaaagaggtagtctagttttccagctaaaagcataaaaagaccatgttaaataacatgagttgttggaatgtgtcctgttccacttccttgccataagacatctgatgagttagttaacctctctgcatttcattgtcctcatctgtaaatcggggcaatactatcaaagtcacatcaatgccaatgcatagagaggaactgaaataatggatgtgaaatattcagcacaagggctggtatacgatacatacccaataagtggcagctacttattttgttaaaggtcaatatacacagtgattaaaaacacaaactttggagctagaataacctagattttagtgctagttctgccatttattttctctgtttctttgaacagggattcttgctaggttgctgttctctcatatgcaaaatggtgaaaatgaaagtacctatttcatgagattattgtgagcctatcgttaaagcagtcaataagtgcatattattgctgttattaagtggttaataactgttagcacttattaagtacttaccatataacagagttgggtaaaaatactcttcatgtactgttatttttctctcacagaaaccacttaacagcattttcctcattttagcaaaagaaattgaggcagagttagtaacttgcctaagtcctacctatagcattgtcagagttagaattcaaacccactttaaaaagttagaaaaagaacaaattaaaggaagtaatctaaataaagacatgaaatcaaaacagaaaatggacaagcaacagataaatcagagtaaaaattggttattgaaaaagactaataacattgcaaatcactggaaagaataacaaaggagagaacacaaactatcattattagaaataacaaaggtgacattactataaattctacagacattaaaaaggtaattagaaaatatcaacaactttacgccaataagtttgatatctcacataaaaaagcaaattacttagaaaaactataacttaccaaatacaggaaacagaaaagaataaacctatatcttttaaagaactctaattttaattaaaaatattcacccaaagaacacacaagatctatagcacttgttaattctataaaacactgaaaaaaaagaatactaagcttgtcttaactcgttcatctgtccatttcaagtacaacaccagcaaaatcctgttactaaaaccagaacaagatatttaaaactacagactaatatctctcaagaacattggcacaaaatttctgaacagaatattagctaaccagatttagcttatataaaagaatgatatatcctaagtagggattattacaggagtgcaaagatggtataacctatgaaaactaatctatatagttcacaaaatgattacaataaaggtgaaattgtatgatcactttagtaagtgcagaaaagatcatataactccctcatgttgtaaactatccaaaaactaataataaaagcaagttttcttaatctgataaggacatctgagaattccctatagcttgtttcatgcttaattatgaaatatcaacatttttcctctaagatcagcaacaatgcaaggacgtctactctcaccatttatacttaacattctacttacaggaggccttagcaattataataaagacagaaaaatggacttggtcggagactatcgtagatagcatgtgatattgttgaaagaatagacaaaaacatcaaaggaattggaagagagtccagaaataattccacatctatacaatcaaataattttcaatagggctccaaagcaattcaatgggagaaagaaaagacttttcaataagtggcaaaaaatgaatctcaactcttatcttatactatatgcaaaactaaattaaaatgagtcataaatctaaacatagacactaaaactataagttttatagagaaaacctaagataaaaattttataacgttggagtaggctaataggtttcaagaggtaagggaaaacactcaacattgataaactgaactttatgaaacttttaaaaaaagttgcttaccaaaagaccttgttcagaaaatagagaagccatggaatgagagaaaatatttgcagcatacatgtctgacaaaatatttttatccagaatatacaaaggaatcttacaacttaataataaaatggaagacaattcaatttaaaaacaaatgggcaagagagttgaagagacacttgtgaaagatgatctaccaatgacccttaagcacactgtaaagtgttcaacattattcatcatcagggaaataaaaactgagaccacaatgtgtttccatggcatagacacactaaaatggcaaaaagactgttgacatgggtgaaatgcaagtggaactcagcactggtcagagggtaaccacttaggaaaactacctagcaaatcattcgttaaaccatatacacctggaagtaacacacattcctttcttcattgcccagaactaggcatgaagccaacccaaatgaaagggaagctaacgagaatagaggagcacatggatgctgttgaataagaactgtctctgcttcatggaggttttacagtaccaaaggtgagaggtgaagatggcttgagttagggtggttatgatggaatagagagaaaggcataaatgcaagagatgttcccaaggtatcattgaaaagactaaaagagtgtaagttggggcagggaagagagaattctggagaagagaatgaagaaaaataaaatgtgtacagttaaacaaccagtgtttattgaatgcttatggcaaaactcctctccaatagttcatccttgggaaagagtgaaagaaattagttaataattaggttattaaaattctgttagttgtctaccctgattttacctaatatgaagcagaggtttatcacatctgggctagtgacctataacacaaagacttatagctttcttcaatcacaatctgccatctgtattagtctgttttctcactactataaagaacttcccaacactgggtaatttataaagaaaagaggtttaattgactcacagttccgtatggctggagaggcctcaggaaacttgcagtcagggtgaaagggaaagcagcatgtcttccatggcaacaggtgagagagagcccgtgtcagcacccaaaaatctaccaccagatcttgtgagaattcactcactatcacaagaacagcacttcccaccaggtctctccctaaacacctgaagattgtaattcaagatgcgattcaggtggggacccaaagcttaaccatatcaccctccatcaactcaatgaatttggaccacctgtacactcagtgctaccttattcagctaatcattaccttagttacaggtgggcgtaatctacagcctcaatctgactcagggcaagagtagattcaactcacttaaggatgaggtctgaatgccagaattgcaatagcctcgaaagaactaagaaactgttagcacaccaagttgctgccttcatgctaaaccgcttctgcatgctcaggctaaccttcaattttgcttaatttttttcctttcaacctcatattttatctctcagtcttagagccttagcacttagccttttccccaggggtaacccttgttccttgaatcctgtgtctcagcagggccctcctgtgatcataccatctacctgaaagcaggatactgagaattgagtgtattcatgctcggcctgcaagaacagcacttctcagcactctcaggccagtgtcatgccctactgggcagagccaagcatatagtctacaagaaacctctgcttaatgaaagaaatatatgatttagtgatttagctttgtctttttcctaccagcctcttaacaaggtcctagcatgcctcaacagggacttactggaattgttcaagatggggctaaattttattactataaaataaagactttactttttaagtaaaaatgataaatgctcattacttttaaaagcagtggaaaaatagaacaaaatctacatacttatgttttctcctacttctcttctctccaacctctatttcttgttttctccaatccttagcatattgttttgaatgacatcttggtcagttgaattttgttactcagaaattcttttaagaagtgttcatgagtactgtatactggaggatgttcatctccagcctctatgctggaggaacaacttggtataaaatgcttgggtaaaaatttctcttggaaccttattgctctactcacttgtggtgcttcatattcctgaaatacatgaacccatcttgaaaggttttcctaatttttcagaagtttccttctattggatcttcaaatacattcttggacttttcctattctattatcccctgatgaagcactaaaccgagttcagaatgtgacttgtttgcctcccttagctactcattagcttccctataataatttttaccactactctcctccactttgtgttaggcactctctttaagacaggacaacgcatgcccaactgttttcatttgcatgtatttagttgcttctaaggtggctttaatcatttttataatttaatctattttataccttttccctcagccttgtagctaacttacttgattttaaccttatttgtttgccttatattatcctcctgattttgcatctctttctgaccttttttggagaaacccttttatctaaagctgctttgagtttataatgaagtagttgtacgaacccttccagaatttctttggacaattaattcttaggatacatgtctgtttcatcttacttttacttatattttcagttcttgtgccaaaggccagcattgacttcttcctggctatcacttatctgtagaaggggctaagttactgaggatgggcacaagaagggagcaataaaatcctctgctcccactcagctttattgtctgcaatgtgatttcgccaaagcttttgtttctgttttttggggtagtatatttcttaggtttcatacactcatttattatgattgaatcaaacattgtgttatgaatattgatgaagattttatacgccaactcagtccagatttgggggataggttggtgaataggatgagccacatctgacctttaggtcctttttttctttttaaaccagtgagcgtggttttgttgttgtttttgttttgctttacaggctgatgaggccctcattttttaatggggatgagagacattaaacaagtaaacaaataaaacatatgattacagtttcttattgctattaaagttggtttagaaatttacttgtgtgagttagcacaaattaaagcttttgtgagtcaggggcaagtcacagagctccgagttttctcatttaaaaattcatacaaataaacctgcccactgatggttttgaagggccttaagtgggataatatatgtacaacacctttggaaatcagttatataaaccttgaacattgctaaaacaaacacttttttctaactgtacttgcagctctctttctccttggctgatgataggtgaatgtacgtagaggaaaatcacgggtgcttcttcgattgcatctccccgtcttcagctccctctcccacacctgggagtggggaggctcctgctgtgattgagaaccactttattcccagttactgctgatgcagggaccatgctcatcttccacagggaccttagcaccaagatgtgctgactctggacaattttcagtgagaattaataacagaacattataatttatcaactggcttgacttgaggtaatttaattaaaatcaattccccagcatctaattatgcatggtgaagcaaccccaatgccgattctgaatctgcaaccttgggaactactggtatatggttcagagactccccgattccctcaactccagacttctaatatagtgtctctgttggagttagagtctaaggtaaaactttcagaaaagccttttgaagggtgagtgtggaagccaggataggttcttcagcatgttctgttagcataaagagtgcaagagataatgagaggctcatgggtacactgcccaaattcctgcagaaaaaaaatgttaaatgcaattagcagcagttgaattattggagcgagaaactatcattggcacaaaggctgtgtgatttgaaggggaagaaattattcagacctgagcacctgctatattccagtccctttgtgtgaacagggtttcattcctcctctgcagtccagcgagggaacagaaaaattcaatatatagcaggcattgtgctggggaaacggacaaagtgcgcttggaatccagatcagtgcctgatggagtggggaagagatttctcagaggttcacttttgatgtggccttaaaaaggagtggtggattgtcagccagaaaaggaggagagaactttcaaggcagcaggcatgaacaccccaaaaggtatgtgtgttcctgaaacagagtcttctagtgtaaagaagagaggaggatgtcgggggcaggccacgaaaagcctcaaatgccaggtttcgtacagtccagattttattgaggagctcagttttaaaagttagccagagaggtgatctgattcataatatacgagaaagatgatagtgacagtagtgtggtgaacagtctagaaagaacaaggccagaacccacagactgggaaagtggtcctggtgagaggtaccagccagcaaatgttgagcagtggccacaaagcagcatgccaagcactgtatacatagaacttcctataatctctacaaccctatcaggatccacaatctctctcccttgtacagatgaggatgatgagaaccagaaggatgaattgtccaaggtaagacatgtagtaagtaagcgatgaaattagagcttaagcccaggttgaatgactctaggttgtatgttcttaaccacaaggaagaaagttcgtgcaggatgaacaagaactttctaacagacctatgtcattaggttactgggaagaataaatgagataatgtactcaaaggaggctctatgagatagtgagctcacatccaaagaggtgaacaagcagaggctgtttactgagacatgaagttgaaagcataagtcccctacccaaactcacatggccagtagtagaccagtctataatccaaatccaggctcctctgaccccaaagcctgtgctctgagaccctgtttcacactgacatctaatgttccttcagcattgatgctacgttttcatgatttatcctttcgtttcccttaagtggattacctacaatagaccagacttcaaaacctccgccttctctctccttaattggggcttttctgtgctgagaaaccgtgcttaaaacccccacagagctatggatggagtgccagcccctgggttgcttcctggtcccctttcatctggtttcaaagagaagacatgatggataagagccagatttatttctggttatcttgctaattctaagcaccatgtctctgctacaggagcagaatgttaaggtaaaaatgttcagaccggcaaaacagaaaccctctttgtagatgagcaggactatgctagctgagtggacctgagcttgtaaatgtgcagatttaaatgtgtgtttgtgcgttcatgtatttgtgtgtgcggtcgctctctaaaaactgaccaaagagaaaggaatgcagagaagtaaaaaaatgtttaggaaatttagaaatatggtgtagtctagaagaaagggcaagagtttggaatgtaaatgagctgagtttaagttccacattggccccctagatgctgtgtgacttcggaaaagttaataacctctctgacactcactgataagatatggaaagaggagcatggaagaggtatgaaaggatgtccattcagaagaacccccttttttctaagttggaccctttgcatttctggacatctgggttcttactctcactcgtttcagtggatactgcctcacataagggctgacctcctgaagatacttcagataagctagctctacaggggctcatctgttgtttcttccatatgcatacattttgggcccccatgtcaatcgccagtgcagtcagccttggcagggctgcctctttccacatgtgggatgcggcagctgtctggcccttttctatgctgggggaggcagagcagtgaaaatagcctcactcctttttacgttttggccgttttcttctggtctgtatttctctccctctaagagttctcaaaatcttaattgattctggcattggtagatgtcttgcaataaagtttatagttttcatcttagagatcatccatgctgtggatatgcgctgggcatggggccagtgaagacactgaaggtgtggctgcctataaataaataacctataaatgactctgagagtctatttttaatcttatttcctgcctttcaccattaagaagtttcctataatctatagacagtttaattatatttttttagtgtatgaccttaaacttttataagcacatattagttaacaaaatctaactttaattaatatccctacccttctcctcttgaattgtgcatggatctgaaaactctttaattccaattatacctctcctgctttactaaggattctatttaacattttaatttcccattgtatgtaaactctaaaattagtcattatcattatgacaaaggttgttttatttgatcaattcttattcgggttttctcacatgttgatcaatttctttgcttgtccttgcttctttcagagttcagtttctaataggaaagtgaactagctatccaggggctcatggtctgacgtttcttctatatgtatacattttgggcccccgtatcaatcacccgtgcagtcagccttggcagggcccctactttccacatgtgagatggggcagctgtgttccaggctttggtgtatccttcactgagataagtgagtggcaatcctcttggaattttctttcttttggggagaggagaagttgtagaaatgcctatttcatctattcttgagtgttaatttagctcagtataaaattctaggttgacatgctcctctgacacattgaagatgtgattacatcatagctagctgtagttgtttttcttgaggaatcactgaaattgcatcagtggaattgatgcctttttgcagtaaacctctatcttctctatggttgttttaaaagtcctcctccccttccctttggtcttctgttccaacattaaatgtctagaagttaattcatttttctattttgtctctgtatttatcattgttcttgaatctgaggattcgtatttttcacacattccataaaatgttcaaacatttcccctttgaatatgtctttccctctattttctccatcatttcctcctggaaattctagagataagttggatcattttatctactactatctgtgtcttctaagctctctttcaaatttcctgtcttgtaactatgtgctacaggcttggtaattaccccaggattgagcttccagttcactagttcttccttcacgtgtaactaatttgatgtttaatctacccattccctgtgagcttctttctcaataggaatatttttattgtagaacactgaatatattctttttcaaatttggcagttctttattaatagtgtttctggattttctgttccaatttttaatttttatgtctttaattatattacatacacacattttgtattcattttcagactgtcttttatctcattctctaggtagtctaatcagttttgttttgtcttcactgttccacaagtgaatatttttcattttgttgttattatttgtttacttttttataaaaacactttattatataaagctttttgaaaattttcccctgaaaatccttcctgttgtgtgttttgagtacacttggccctccaaattagtgggttccatattcatagattcaaccaacctcagataaaaaaatattcaaaaacacgttttgtctttattaaacacacacagacttttattccttgtcattatttcatactcaatacaaagcagttatatcgtataggtattattaataatatagacatgattacatgggaggatgtgtgtaggttatatgcaaacactgcacctttttatatcagggacttgagcatcctcagatgggaagtcctagaaccaattccacatgaataccaagggacaactctatttccctcaagacgtctgagctccagtggttatcttcagcctgagactgacttttatgctactttctttgagtgggatttcttgccccacataggcagtgttaaatcaagccccaggtccacatgaagcccaatgctgggttttctattctcaggaaaggctctaattttccttccccataccccaggcagaaattctctctctcttctgggttttttaaattatgtcctatggagacttttaattataaacattatttcttatttcatccttggctagaaaatatagttgaatcagaatctaaatgaaacccagttaacagttaataaagaacttttaaaaattgagagtctgttgattcagatactttgagatgattaactgtgagctaaccaatataccttctagataaaaagagaaatatgagtaaatattggcatacctgtcagcataaaaattaagtcaaatctgtgtttattctggatcttgttcatcatagggctgagttcctttctaaatgacttgctaaaataggcaaaggcctctcttattatattgaaaagaagtttacaaaaatactgcagttacaagaactcttgaatcgcaaccttgagactggcactaggctatatttgatgtaaaacaaatgttcttagaatgtatattttacactgcatatttttgcataacttacaaactatgtctatcatgtaaggttgatcttacctacctaccatggtgataaagtgaatcactataatttccctactatgacatcactgatattaccccaattagcttaatctttgtgaaaaagatgtaaaggcagtcttaaaatgaggcaggcagctaacatcatagttcactttttaaaatatatgtacaaatgaaagcaggtgaccaatagactcacttgagaatacaatatatctcaaattggccctataagccactctacagagggttcagagctttatgcaaaggtctaggttctaagtctcatgtgggttggatccagaacctctttcctgtcctcactacttttgagacctaagctctcatttactgtggtggctttctgctctgtcagctgcactcagatggaatggcatcttctagaatccccttccctgcatggctaacattgccctcaagaaacattttgtgcaagacttaggaggttgaagtgaagtggaagccatggttattctctgaagtccatgctcagggaccttatcacgtcctgctgtgtccctctgttggcatgtggtggctgctggcccttcctacagctgagtctacaataattacaaaagttcatgaaggtggctgaggatggctcatgtgtaccatctccaaagcttacaaccatatccaaatatattaatcagatcatttttcctgacggaagttgtttggttttgggcaatatgcatagggtggatggagctggaaagagagaatgcttgaggaaggtctgcgttcatctcactacccaagaaggtaggaaagtggggtagaaacagtgtgttaaactttatctgggactcacgctttgtagatgtgagtctttgatcatgccatttcatctaccttgaaaactatttccccagccccattttgtgcctagcaatatgtttctatttttattaaataggtagcatatcatctccttttgaggctttttcttgtccttcctttgttaggatgttctattccacctccaacaggactagatataattattgcctccttagagttccctttctttttgtttgtacccctcctgcaacacttgtcaagtttcttattttattgtaatcacattgaatacatttccactctctcacctccctctttacaccataagggagagatagagagagaaaaaaaataaaatagaggaaataaggaaacaagaaaaataaagtggaagcaagaatgtcaagttgtgagaaggtagttgaaatctatacaattataacaggtgtaagtatagagaaaagcatgttctaccaatcagattttatagattggcaaaagaagataatcatgaattttgaacatggtagtttcaggattaatgggtgtctgtgatgtttgtgctaacagttagtgtttaccatgcacccatgcgacctttgctctcaggcaatatttgataaaaatcttgagagataactcagactgtttttatttatttgaattttgaaactgagggaattgagtctcaggcaggtgaagtaatatgccacatcacttcattagtaagtggcagaagtagctctaaaaatattgactcctgttttagtaatgtgtccattaaatatgatgtacttgcataaagttgaaccatataagatgtaaccacaaaccctagaaaaagtgaaattatttgcaaagtgaaattataatgtagagcagagagaataaccacaactaattgggaagcagcatcaaacagccatctttagcatttggagaaagaaatcatgcaggccaatgactactttctctacctttggatcttggcatcatcattcactacatactgggttgcatgaatcaggtctgtgactctgggcactagggtgaagagttctgtgacatcgaagataaaacacatcttcagcactcacaagaatggcttttccaggttgagaactcccatgtggcaatgaagtataatgtaaaatatattttatcagaggcctgggtttgaatcccagcattgttgttatcaccaagtcctttcacctagctaagcctccattttttcacctgctaagtgaaaatgataatctgcaccacgctgggaaaaataaacaagattttacgtgcaaaatacccatcacataataggagtttaatgagtcctccatctctatccccacttgcatgagagaaggaaaaaaaaagaataaaacaaataagctcatatgtgttttgtagggtgagttcgtcttttttacttcagtgtaatatactatgtgaatgtctaaggtggctgagtagctaataaatgcctgtactacatgtctcaaagttgtcaactagcagttatgtagaagtataaatactttaactttcatattggctgagaccttgttgctcataattccctttaagtaagttctttcttggcacacaaaataacaattccttccaaatgtttcgctctgagcagcttattgaagctattgtagatataatgttctacactgatctatcagcatgattacttaattctagttctacatcactagctaaggtagaataaaggtttgcaagacaattctagggctaaacccaatgctggcttaggatctgcagagccagctgtatttaaaatgtgtattttgggttacaaaagctgcagcatgctgtctaaatgaaggggcccttgcttctgtgtgatgtgtgctacagagtaatagaaacttaatagcagccaagtgatagaaagaccctaatcacaaaaaagcagaaggggtaaaaaaatggatgaagtttgcctcaagagatttcagcagaaagctctctaagagaaggtaataaggttgatagtttttcagaaattggtagtgggcagcattgctggtgattaaagtaagaaactgggaataagatggtcttgactcaacttctgaaggcagggctatttggctggtgattcacaaaacagaacttcgcattgctgatggtcaaattccctcagctgtaaacagacaccatagcacagcagttagcagtatttctctttatgtggctctgtctttaaagggcagtgtggaatagttgaaggagcttgggcttcacatcaggctctatgtcactactagctggggaaatttaggaacaggagttcccgattaccttgctaactctctctaaataggactccgaatgcctatcagacagtgatgtaatgaaaaacaaatgggagtgtatatattcagccaatacaataagattctgttctccatgaaccatgttaaaaaaaaaaaactattataataatttggcctgttgccctacgaatttccctcctgcctttcttcctccaagcccactcactagcccctggatacctgcatgatacacaaaaaaggatgggagtgggaacccctgagctgtccaggctccagcatccagctgggggatgcagcaggtaatttaaactctctgagcctcagtttcctcatttttaaagtaaatacagcagagtttcccacatttactggttgttctgtatagcagaagagatacagcatgtgaaagcatttgaagacttgtaaagcccatgcatatattagttatgcatctttatggttaaaattgcctaagagaaatcaaggcctcagggatcctaaggggctctcccaaggtcacgcaggagtgcaaagtcagagcaaagattgagatagaaactttggactgaaggaccaggaaaataaaatttcatagttcacaagagaccatgagtgatgctataggactaaggattacatggcatgatttttaaagcccatatgtaacccatatgccataatgtgcatattatagatatatatgtatagtacacatatgtatactacatatatatcatatacatgtatcctaatatgtataaaaatgtgtataggtgtacatatatatctatgtataaagagaatgaaagaatggagttccagattctttttagaaggcaaatttagattttaaaaattgtaagcaggctctgcttctaatgtagcaactaaaattcagctttggggctgaaacttcctttcctgggggaggagctgtgaacgcaatcaagttttccaaaagcagctgcctcagactgagatttctcttcagtaaagccaataggatacaaaagccatgggatacccgggaaggtttaaaattgtgtttttttttttcctaaaatcatcttcagactgccatattcctgacaaccacaggacaatctttataaaaccatcatttctgttagattgagaggtacactgggcctgggtcaaaaatggcatgaaaaatgacatgattcaccccaggctgggaggcagattggcacaggtctaggctgtttgtctcactcactcacttggcataagttaggagtcatgcagatttgagggggtgtgttgtggcaatagtattgtctcaatctcggggctggaccgtgcccttgtgcctggtgtcaggtttaccctgaacattcctacctcccatctttttttttttttttttttttgcatttgtcacaaacctgaaacattacaattctgaaataaatgttctaaacgtaactcaaacaaaaccttcaatattcattctcatcagaggtcttgcctatcaaaagaaaatgtcctttataaaaagaagatgaggggattagtggagaagactttcacctgaatgggactatgcccttcacattttccctcatctcatcagttttcacgtgcatgggagggcggctcaggctagggaagagtgagtgaggatgcagccctgcggaggcttgagtggtgctaactgagcagagagtagtcagtgtggtctgcagtccagtaaggtggaggaaggacaagtcctgagagagagtggaagagaataatggtcaccttggggtgtggaggtcatatggacctattgggggcgtgtaaacagggtggattaactgaatatcactcaatagggcatagaattaagggatagaagtgaagtgtgctttcatggacacttgaaacaggccttctgctttggcacaagagatgagaccagttagcatctagaatatgggaatgagcgtgatcatttgacttccagagtgctgggggtgccaggcattcgtggtagaacagaacttcatggcatttcttggtaaccagtgcttacaccggcagggtactgtctcctggtgatgctcttcttttttaagggtttcagagataactctttctgagttagttacacagagggatattgccatttttttgtgaggaaggttggacaagactccatacaggagggagcatttggaccggaatctggcagtggagtaggagttccccaggtggagacggacatcaacaaggtaagctctgtgactgagaggcactgagaggcactgtttgatttgctcactactgtgtccccagaacctggagtagtgcttggcacatggttagtgctcagtacattttttatgtatgatcagtgtaaagtgtgagggacagagatatgatttgtcagcagagtggtcaaaagtagcaaatggacatctttgctggggcagaggaatgacaacaagaaatcatcagaagctgaggctatagaaagggagaagggacagattggaaaggctgtactgggggagctgagcatcatcttgtaggtgtcctagggaaaatctgctgtctgataagaaggttctgggtgcaatgccaggcatattcagatgccgtcaaattgccctggagccattcttgatgtttacctcttcagctatagtagatgaataatggctccccataatgatatcagtaccctaacccctagaacctgtgaatacgtacatggtaaaagggcctccatagatgtaacgcaggttacaggccttaaaataagtagatgagcctggattacccaggtagacccaattgaatccccagagaactttctctgacttgagacaggatagatgtggcagaaggagagctcagagatttgagtcatgaaaagaatttgctgcactattgctggctctgagacctaggggccacatgcaaggaccagagagaggcccctaggagcccatggagagcacaggaagggatgtgggtgccctggacgagcacaggctggtccctggctaacaaacagcataaccctgtctctcctcctcactttgccttatttttctctataaaacttaccctcagctgacattttgcacattttcttaatagtcagccatagcacttacctcttccctagcatctaagctgacaagagcagggacagtttaattaggatgctatctaagttcctagaagagtgagtggtctatagctgctgctcaaaaacatatttacgtgagtaagtgatttctatcattacatcctcccaagaaccctgtgaggtatgcattattattcttgttttatggaagacagcaacggggctctgggaagttgcaagactgtccccagacctcctcaaattgccccagcttctcagctcagcactagagacaaggtaggagccggcacgcattctctgaacagctaaccaaggtggctgcattggaacccaggcctgtctcatggcaggtacaggcagtgtccatgacacctcgtggcctgccctgctctggtagcacgcagatgtgtcaggtgccatgtgaacccacctctgccagcctccgttcatcttcctgccgaaatgtcctccttccttcagtttcccatttccttccatagtaaagattccgtttatttcatgccagagtaagattcagccttgaattacaacaagggatgttatctgacatcagttgccaccgcttaaagaggtttaggcttgacggattgtaaagccatttgcaggggctggagctgagtgacaaaacgcccgtcatgaggcgtaaacctgtcaactgcaattacccacaatggattccagagaggcagaagaattaaatcttgtaaatccaaaaggcccgattggagtgacgtatttattgggcatcacttaatgagggctcccaaatggactttgttcctctccttgggactttgctttcttcctttttgcataacacagatatgtacatgcaaggggaagggcaggaaagggtgccaaggtactgtgaactggtcatatggtcggttagagctagagagtccaaagccaccatctgctgggaccactgggaccaccagccacagcatcacatccaacccctattaacaaagagccctaaaatgcttctggctcaatcttgagagaccccaccagactactcaacaaaatactgtatcttttcataatgtggcggtgtagctggtgtaacctgaataatttcccaggctcacttttcattagctaggaacatatgtatatgttctccatagagtcaaagtgacaaccatgtccacctctctcacggttcttccttactctcatcccatcgtggcaggcagatatagggaatccagcagaatggtttacagcttcagggttgagacagcctcaccatggaaggaaactgagtccctgaatgacttcttggagcagaactcctatatggtcctcactgccccagtttctggtagagagtaaatattaaataaatggtaactgtaggcaaggaaggctttaaactattctttgaagaattagtagagtttctgtagtgagaaaatatggaaaaaaagtgtctgtattggaggaaaagttttaagtcgtaggaaacttacatttttaaagaatctacaaagtggcctgatttcacacttggatgtgtaataggtatctcagacacaaactaaactcttgtttcttaaatcgcctgctcccctaccccatgaaagacccttcccttctcatctcttccagtaaatggcaattccacttttccagtttcatatgtaaaaattctctgtgccaagctcaacccttttccttttctctcaccccacatataatctagcagcaaattttattaactccgccttcaaaagacagccagatcctaccacttcttgtcacttcctaggctagtaacactctaattgaagccaaaatcttccacctagacagcttctaaacccacttaattgatttccttgctttcattcttaaaccccttaactccaccactatttactgtccacacatccaagagactatttgaaaacatgaagtcacagcatgcccttttctgttttctgaagagtttccagtctcattagtaatgggactgaaagtcctagctatgggttttaaggccctgtatgaactgcctctccatgacttctctggccttgtttcccaccacttggcccctcaccacctcctttgcaaccaccctggcttccttgctgtttctcaagcagcaaagctcactgctatctcagggccttcagacttgctgtgcattctgcctgagaaatctctccccaagtagtgcacagctcactgttgcttctcagccacccgctaagcagggcaacctcctcactctccatcaccctgcttgaaataatatccctgccactggctatctccatgccctggtggacaacattttcctgcatagcctgagatagctcatctatatttattatctagttccccctatgggagcacaaactccaacagagcagggacttgaagccgtggcaggaattc

SEQ ID NO: 33 - DNA, 349371 bp, Homo sapiens
gatctttgaagaaataacaagagggaaaactaaatggcacatggtttccactaattgtatcatgaattgtctttattttatcctctacaccacattttctatgtaaagcgtaaggggaaaataaattaaaataaaataccagtcagtgaatgaagacagaaaacattttaagagtaacaatagcaacaaaatttccacaaccatagagagctaccacaaagggcaaaaaaagaaatcctatgtataaataatggaacagtgtttaaaaaatctagacacagtagagcttcagcggtaaggcaagactgaggtttgagtggccagtctgaagtttacataagaatagcttcttaagaaaggatttcaggtaagataccttggaagttaaatttcctagtaaagtggatactgttgaattcatttataagacaacaaattcttttgctcataaccccagaagattcttgtcacaggacggcaaaactaactaatcaaattgttagaagtagctgtagtttaaaaaaagcagagccttctctttcccctacaagcatttagtttcctcatcaataaccctaaaagcttcccaataaatcagacatatttctacatatataaatctgctttatatgaggcaaacatcatgtctaatttctggagatattgtcaatttgtaatctgagtatttttagtgtattttgcctgcaggttaaaaaatgccctatttcagcaagtcaattaaaaataaatgttttgaaatgaaaaaaaaaaaaaaagactgagtaccaatatgctttggctctgtgtccctacccagatctcatgttgaattgtaattcccaaagttgggggaaggacatggaaaatgctgatagtaatatggacagtgaaatccaggctgaggtggtcccagatggagattaagaacttattgggaactggagtaaagattactcttgctatgttttagcaaagagactggtggcattgtgcccctgctctagggatctgtgcacctctgaatttgagagagatgatttagggtatctggtggaagaaatttctaaacagcaaagcattctagatgtggcctggctccttctaaaagcctatgctcaaaaaaataaataaataaaaataaaaataaaagcctatgctcgtcttcataaacagaaatgatctgaaactggaacttgtatttaaaaggaaagcagagcataaaagcttgaaaaatttgcaacctggccatgtggtagtacagaaaaacctgttttctggggaggaactcaagctggctgcataaatttgcatatgtaaagaggagtcaaatgttaatagccaaggcaatgtgaaaacacttccaaagcatttcagagactttgtggcagctcctcccatcacaggcctggaagcctaggagggaaaaatggcattgtgagccaggacaagggccccactgctctgtgcagccttgggaaatggcactctgtgtcccagccactccagctctagctgtggctaaaagggtccagggtatagcttgggccattgcttcagaaggtgcaagccctaagccttggtggcttccacgtggtgttgggcttgtgtgtgcacagaagtcaagaattgaggtttgggagcttccaccttgattttggaggatgtatggaaatgcctggaggtccaggcagaagtctgctgcaggggatgagccctcatggagaacttctactagggcagtggggaaggaaaatctggggttagaacttccacacagagttcccactgggggactacctagtggagctgtgagaagagagccaccatcaccatcttccagaccttagaatagtagatccactgacagcttgcactgtgcgcttggaaaagctgcagacactcaacgccagcccatgcaagcagatgcgtgtgctgtagcctatacagccaaaaaggtggagcttcccaagccttgggaggccaccccttgcctcagtgttgcccggatgtgatacatggagtcaaaggagaatatttcagagctttaagatttaatgactgtcctgctggcttttgtacttgcatggggcctgtgatcatctttttttggccaatttctcccatttggaatgggagcatttacccaatgccaactaacttggttttgattttacaggctcataagcaaaagggacaagccttgtctcagatgaaactttggactttgacttttgagttaatgctggaatgaattaagacttttgggggctgttgggaaggcatggttgtgttttgaaatgtgagaaggacatgagatttgggaggggccggggaacgaaatatatggtttgtgtattagtctgttctcatactgctataaagaactgcgtgaaactgagtaatttataaagaaaagaggtttaattgactcacagtttcacatggcttaggaggcctcaggaaacttacaatcatggtggaaagggaagaggcacatctcacatggcagcaggtgagagagatacatgtgtgtaggaagcaaagggaaaagagccccttataaaaccatcagctctcatgagaactcactcactatcatgagaacagcatggcagaaaccactcccatgatctgatcaccccatcacatctctccttcaacacccgaggattacaattcaagaggagatttgggtagggacacaaaacctaacagtatcagtttggctctatgtcctcacccaaatctcatgttgaattgtaattcccaatgttggagaagggacctggtgggaggtgatttgatcatgggggcagatttccctcttgctgttctcataatagtgagggagttctcatgaaatctgatggtttaaaactgtatggcactttccccttcactctctctctttcctgctccaccatggtaagatgtgttttcttcctctttgccttctaccatgattataagtttcctgagggctcacagccatgcttccagtacagcctgaagaactgtgggtcgattcaaatttttttcttcataaattacctagtctcaggtagttctttatagcagtgtgagaagggactaataccagtatgtagatggtggtttggttcccatactattcattctgtgggtcttgaatttggggcagctgcactttcttcctcgtcaccgtttctagactgtgagatcacactcactttctctccataaaaacacccagaatccactccctctcatttctttagctcctgtatcaatgccattttctcaaacactgactgtcataatttgtggagatttaagtatccacctagaagatcaataaactagcctcatagttctggagctcctctcctcttataatctgatcttccattttagctcagtcacttaatcacatggtgtattagggttctctagaggaacagaactaatggaatagatagatagatagttagatagatagataggagtttattaagtattaactcacatgatcacatgatcccacaataggctgtctgcaggctgaggagcaaggagagccagtctgagatccaaaactgaagaacttggagtctgatgtttgagggcaggaagcatccagcatgggagaaagatgcaggctgggaggctaggccagtctctcttctcacattttgctgcctgcttatattctagtcatgctggcagctgattagtttgtgcccagccagattaaggatgggtctgcctttttcacccaactgactcaaatgttaatctcctttggcaacaccctcacagacacacccaggataaatactttgcatccttcaatccaatcaagttgacactcagtattaaccatcacaagtccaccccttatctacttgaacccatacacatctcctgagatcatacataatcttcaaataaagacaataatgtcataattacacctaacataatacaactatccttcatacaaccagaaatgcaccaattcccaacccaaataatatcatataaagttaacaatacttaaatgctaatgtaaagttaataaatctcaagtcacatgaaaaaggagaaaggaaataaaatgaagatattttattggtacaagtgtatacatgcacaaacatgtttttcacaaaagaagggggaaatattcatgacagttacagtcctcgtttctgtagctggtcacatcattgtaggtggtattgaagaccaccttcttctaatacccattctgtattccctttgccttcagccagcacctcagaaggtcgtgggtgtttgttgttgtcattgttgttgttattttgttttgtttcttttttttctggtggagtaacccaaactttcattcatgatgggtctggccatttgtagtcctgcctggattgggctgttgtattttcccattgaccttaatcacagggcatggtaatactaagagatgccctaatggatctcctgtattccatgcgtactcttctttacctgccttatggagtagtagactgatttcatcttgatagcctgggtcaatcaccccagccaacactgtagctcccatcttagcctgttgacttaaagataggaggagcccaaagtttacagctgacaattttaacttctagtttaatggaattgttgttgtgtctcctggtggcagcattcatccctctggatctaagacctctaggccagcagaatgtaatgtcacaggaacagaaagcaaaaattttgctaatggatcactaggggtgatggtgagtggtaccacttccacttccaccccttgattcctggacccatgaatctggctatgggagaaacagtaccatatattggacacttattcagagcatgcacagccctctggagaactttgccccagccctgcaaagtattgtgacctagttggtgttgtaattgtgacttcaaaaggccattccactgttctatcaatcctgctgcttcaggatgatggagaacatggtgacaccaatgaattctatgagcccaccgccgcactgctttagctgtaaagtgaatgccttggtcagaggcaatgctgtgtggaataccatgaccacagagaaggcattccatgagtccacagatggtagtcttggcagaagcactgcgtgcaggataggcaaacccatatctggagtaagtgtctattccagtgaggacaaacctctgccatttcatgatgaaagaggtccaatataatcaacctaccaccaggtagctggctgatcaccccgaggaacgttgccatattgagggctcagtgttggtctctgctgctggctaattgagtacccagcagtggctgcagccaagtcaacctacaaaagtggacttccattttgctgagcccatgtgtaacctccatccctgccaccatggccactttgttgatgagcccactgggcaatgacaggggtggctggggaaagaggctgagtggtgtccacagaatgggtcatcctatccacttgattattaagatcctcctctgctgagatcaccctttggtgagcactcacatgggatacaaacatcttcagtttttgacagctcagagaggtctatccatatagctcttcccaaaatttctttgtcaccaatttttcaatcatgcttcttcaaagtccctggccaaccagccaaagcattggctacagcccatgaatcagtatatatttgcacatctagccacttctccttccatgcaaagtgcacaaccaggtgaactgcttgaagttatgcccactgggaagatttcccttaaccaccattcttcagggatgtcctagaaagagaccgtagtgttgcagctgttcacttttgggtggtgcctgcatatcatgcagaaccatctgtgaaccaggccctagtattctcttcctctgtcaattaatcctagggaactccccaagaggccattgttgcaggctgtgggagagaaggcagggtaccaggagtggagaccatgggcatttgagccacttcctcatgtaacttacttgtgccttcaggacctgcttgagccctatcacatatatgccacttccatttgatgatggaatgctgcattatattggacctctttcatcatgaaaaaggcagaggtttgtcctcactggaatagacacttactccggatatgggtttgcctatcctgcatgcagtgcttctgccaatctactttatgcataacctactttatggctagatgggtcagaaagtgcccagttcatgataagcagttcaagttgcatggtgacttgatgatccatagtcaaacattcagtttccaccaaagcccagtaacaggccaaaagctgtctctcaaaagagtagttatctgcaatagcagttatcagatgatgccagggccttgctccaaaatcctagaggcctccactgtgattcaccaatggaggcctccaaaggctccagacagcatccctatctgccactaacacctaaagcaccattggatctgctgggtcatgtgtcccaagtggcagagcagcttgtacagcagcctgaacctgttgcagagccttctcctgttctggggcccactcaaaactggaagccttttaggtcactcgataaatgggccagagtaacacaccaaaatgaggaatgtgttgcctccaaaatccaaataggcccactaggcattgtgtctctttcttggttgtaggaggggccaaatgcagcaacttatccttcaccttagaatgaatacctcaacaggctccacaacagtagacccctagaaattttactgaggtaaaaggtccctgaattttagtcagatttatttcccatcctctgacacacaaatgtctcaccaataagtccagtgtgtttgctacttcttgctcactggatccaatcagcataatgtcataaatgtaatggaccagtgtggcatctcagaagtgaaaagcaatcaagttctctttgaataagattatggcacaaagccggagagctgatatacccctgaggtaggacagtaaaagtatactgctggccttgccagctgaagacaaattagctctggtgggccttatggacaggaacagagcgaaaggcatttgccaagtcaatggctgtataccaggtacccagagatgtgttaatttgctcaagcaatgaaaccacctctggtacaacagctgcaattggagtcaccacttggttaaacttatgataatccactgtcattctccaagatctatctgtcttcttcacaggccaaatgggaaggttgaatggggatgtggtgggagtcaccaacactgcatttttcaagttgttgatggtggcactaacctccgcaatccctccagggatgcaatattgttttttatttaatatttttctaggtagagccagctctaatggcttcaatttggcctttcccaccataatagcactcacctaaccagtcagggagctaatgtgggggttctgcaagttgctaagtatgtctatgccaattatgcattctggcactggggaaatgaccacaggatgagtcccgagacccactggacccactgtcagtcggacttaagctaaaactctgtaattacctgacctccataagcccctactttaactggaagaccacaatgatgttttgggtcccctgggatcaacatcacctcagtgccagtgtccagtagtccctgaaatatctgattatttccctttctccaacgcacagttactctggtaaaaggccggaggtctcctggggaaggatgggagaaagattcactgcataaattggcagtaatgttgtggcatccttcctcaaggggacccagcctctccttcactcaagaggttctggactgtaaactggctcaagcctggaaattgattgaggggccatgattctctctttttataattcaaattagtcttttgtccattcgacctagaagttgtctgcttgtatatattaagtagaaatgcagtaggcttcctataaatttcacttctaggaacaccgtaattaattagacaatgctagagctctacacaagtcagactattctgattgttgctttgcctctgctgtcaattatggtagctatgcccacctcacctttgatggttaagtgccaccactcggctcctgccacctcaggatccaattattcccatggtatttaaattttgtagttgagtgactgcagttcccactgttagatctgacatatggagaagagcaattacaaggctcttcaaagatgcaggtgctgccctcgcaaaatctatttcacaaggccttggtcatgggtatattttctgggtcctcccggctgggatgactaggtctaaagtgactaatccactccaccatcccaatctccctaaggctttggatcccttcctctatattaaaccaagggatatcaggcatttctagctggctcacagtgggctatcttttaatcgatatttcagctaaccaagcaaataagctattagaaccttttttttaagctcctcaagctgcaacattaaatacagagttcctacttagtgggcccaaatcaataaattcagcctgatccaactctattttccttccaccattatcccacacccttaatatccattaccatgcctgttctccagatttctgtttatacaaattaggaaactcaagcagttcttttcaagtgtaatgcacctccttatgggtcacactttcaacctcacctctaggggcctgctgggatattaatctagttataggtctagaagcaaacaggggtgttgggggtggcttctgaggagaatcaacattatcttgactggcaactgcctcaggggaggccatcactgttgcctcagggagcacaggtttatgtcctcagacaaaggtggaagggctgatggcagcatgggtatgggagggtatgttgccactaccgtagatgggaaagctgtttcttctggcaaagaaagcttaatcagagtttaagctcagtgtcctaagcttcatcagggtcctcctgcatgtccccgttccaagctgcaaggtcccattattttccaaacgatgccctcactttaacagtagacacctgacaaggctgtgcatgcacctttcattgcaggtcagccacttgcatgataagagcttgtgtctgcttttacacaattttagctctttctctatgggagataagactctcactcagggcagtcttggcagatttgaggctcagaatctgcttctgaagctgagagatagaatccctaagttcatcattttcattcatccctttgtccactgaggagtaaccaaccagcttctatatgttccttggttctccacatatggtcaaaggtattaagtacagggtcactaaactccttgcctctcacaagtgatgaatcaggactatcaaatgcatttattttgcataactctctaaaccgttcatgctaaagactatcagtgctctctatattattagaagttgggtccttagcatttctgtaaacagttcatgccaaagactatcagtgttctccatactatgagaagtagagtccttaacatttctgggtctattcatattattaagcagccaactccagaaaccccaaagttaatgaaagaaccccatacttaataatctgctcctttagaaccacctcacttctggtaccaaacttgtgttagtcagggctcgctagaggaacagaactaatggaatatatgtgtatgtgtgtgcgtatgtgtgtgtatatatatatatatatatattccatatgtataatggaatatatatatatacacgtattccatatgtataatggaatatatatcatatatatgtatatatatgaatttattgagtattaactcacatgatcacaaggtcccacaataggctgtctgcaggctggggagcaaggagatccagtctgggttccaaaactgaagaacttggagtccaatattcgagggcaggaagcatccagcatgggaaaaagatgtagggtgggaggctacaccattctttgtttgcacatttttctgcctgcttatattctagtctcactggcagctgattagattgtgcccagccagattaagggtaggtctgccttttccagcccacagactcaaatattaacctcctttggaaacaccctcacagacagacccaggatcaatattttacatccttcaatccaatcaagttgacactcagtattaaccatcacacatggtcatactattgaccttagttttacaatatctgcaatcactccttaatttcaattgtaaacattcaactgctaaactaccactcttatgtttccagccaacctcttttgctaccttgacagagataatttttccactaaactaagacctgtaatcattgatcctaaagcttttcacttgttcttactccctctatatcctcctttccatcttgatgcagcttcaatttaaaagtcagttaatgtaatgaattttgtgcacatatcctactgtatctcctctagctccccatgcttctctcaattcactttacccacctagtgagactagaaccttagttaaataaaatcctccagctgcttatctttgcacccctgcatctgaacatttctgtagaaaacacaaaaccacactgaatcttcacatttaattcatgaccactaacttcaaacagaaccttaatcctgactagctttcatgctgtatttccctagctcacccactctcccccacttctagctgactattatatccttgctcctatttctttaaatctctagcaccacttttttcatccttgttctcagacaataagcgtgtttcctgttttcttttccattgagaaaactgaattaccaaatgagaactcccatactttctcaccactacttttacctacctgcctgtacctgtatttttatattctatttcccttccatttctatgaatggcttcccatgctcctagccaaggcctatgcctctctccctgtgaataaaatcctatcagcattccacaactcaaaggcatttttccagacaccctccctattttcaccattaaattttgcttctttgctgaataattcccagcaggaaacaagtcattacttctcccatgacacacaaaaatatctcaaacctatttccctttcagctaccacattgcatctctcttttactttacaggaaaaagaaaaaaacctaaagaattatctgtacttccttgatttatcttctcccattccctcttgaactcactgggttttcacaaagctatccacagaaactgatcccctcatagttgctaattatctcatacggaatttatctgtcctctcatttggtctctcagcagcatttgtcagaatttatctttctctccaccttaaaatattttgtcactccactttcaggttagtacagtcacttggttttcctcctatctttctgactattccttcttaatatcttttgttagtttctcctatctgcagcctaaaaacatgtgttgccctaaagttcagtcgtcctttccatttatacttgcttccttggtgatctcaagtctcaaggctttaattatcatctacacgcgataactccaaaatccttatgcccaagtcagactcttacatgaactccagacttgtacatccaaatgtttattggatatcttcacttggttgcctaacggtcactgtgaccattagaacacatctgatctgtgttcacaacattcttcccccaaagctttttcttccggaagtcttcccccatctgagttaattttagttatttttgtcaaaaatgttgtttttacctatgatttttcacattctcccacacttcacctcttttccatcagtatattctgttggcactaatatcaaaatatatccaaaatttgacatttccactacttcactgccaccaccttggtctaagtcatcatcatgtctttcttgaattaatacaattgatcattctgcttctgttcttgctctcttatagctattttctccacacagcacagagtgatcctgtgaaaactggtcagataatgtcgctcctcttctcaaaatcctcccatggctttccacagtaagttaaagttcctactatggcaatcaaaactacacaactgtctttcctttcctctctgacattatctcctactactcttccttaggtttctccaaagagaacctcctcactgttactttcacatatctggcatgctcctggctcaagggctttcattcatatatataactaattatatctggaatgttcttcctccagagagcagcatggtttactcccttactttacctctaagcacatatatctctgaatcagtaactccatctgaaacgtacaatctaccacactatttctaattattgttcccagctttattttttccttatcttttatcattctttaacacattgttttatttatttatactgctttgtgtcttttcaagcagaatgtaagtgatgtgtgtgtgtatatatatatatatatatatatatatacatataactattgtttctctgagcctagaacagcgttgggaaataatgggttctcatttattgaataaaaacattaatgtagatattatttattactctttatttcctttccccattctttttgtttattttcatagactgacctttatactgatcttagaacatgcaggtctgtgttctttgtctatcaacttatgtattttattttctttcaatggaatgcattccaagagaatttcctgctttaagcttctggtttaccaatgcactgatttgctcttgctctcctattgagcaaattcattgattattttaaaaattgataattatatttttaagagcttaaaccttgaattcatgaggttatttgttcttatcctatttcaaaaattatggaccatcacagaaactttgttttagaagttctacctctgattacaaaatattccacataaaaatatgtatcgatatttgcttaacccaaactcccatattaattaatattaaagaatgaatcatcttttaacaataatgcactagatgtaagtaaagctgaagactaaggggtcaatacattgaaataacacctttgaataaggagattcaagagccattttaactttcctccaacacaaagataaagtatttcaggcagaaggagtttctagttgatattttttttctaaaaagaaataggggaaaaatctgtatctttaaagactttaaaccttggtgctatcatggggtttagataaaactgagatagaaaatgaaaagagttgaggtcagtcaatggtttgttcctttcaaacaaagaattctaatcttaaaattaccagattccagaaagaaatgttctgttatataagctggaagagaaatcaaaagcaccacatccatgacagcataggtcaagaaaatataaagactcaaaactttaaacaaaatttcaaacccagcaagaacaaatttgggtttaaaatctagaactaatctgacaattgacatcagtgaggaagaagaaacgtttcttgctactaggagattttattagattcttttaataagcgttcacttgccctttatatactctgatttagttctctaaatttttactgtggcattttgtcatttttatatagcctcaaagaagagcctggaattaatattaattttgaatattaaatatgcatatttcaatttttttaactttctattttttcttaagggaataattatcactcactttgccagtgatatattataagaaattataataaacacaagttgcattttatattaatttatgtgagattgaaactaatcatgtaagtttctttcttgtccttttttgttgcatttttatttttttattttttatttctttcattttaagttcaggggtgtaagtttctataattagtccactctttcttgttctaaattatctacaactgataatctccataatgatattcagaaaataaatatactttatttcttaatttttttagttaaaataatttattaataatatgctagaatagcatctcaatgagcaaatgcagaacaagttcagatcataagaatataatttagacatgtagcatcagatgttgacaatatatttttaaattgtggtaataaaagaaacccaaattttaggacagtagctatactaattagtatactaattaagtatactaattaagctatacttaattagtataagctatactaattaattagtataagctatactaattaattagtataagctatactaattaattagtataagctatactaattaattagtataagctatactaattagtataagctatactaattaattagtataagctatactaattagtataagctatactaattaattagtatactaattaagctatacttaatattttatatataattgtgagacattattcacatcactgttcagttttgagaacacttatctttgccctagatttatttttcatttaattactgttctaaaaatagtactctactttatttaaaaatatgcaatgagatgtattcatttaatatagtataaactcaaaaatagtaagaattttttttaaaaaagagtattcaaggtactttcatttgaaggcaattctacaactatggctatcatttagtaaatacctagaaaagttgatgctagttaagtatcttttcacaattaattacatcaggctttataaaatatcatggtttatattctacttttatttttaaacattcttactgtataataaggcatacaatatgatgttttgatatacatgtagatagtaaaatggttacaagagtcaaaaaattaacatagccgccctcatcttatataattacccactttgtatgtgtggcaagagcacctacaatatacccttttagcaaaaatatcaagtacaatataatattattaagcatagtcctcatgttgcacattgctctcttgatttgctcatcctacatatttgctactttgtatcattttacctacatctccccataccccgtaactattgctttatcctctatctctgtatacttgactctttttaagaatccacatataagtgagattgtgcagtacttttctttctatgtctggcttatttcacttagtgtaatgtcctccagattaatccatgtgtgacaaatggcaagactgaactttttaaaaaagatgatgaatattccattgtatatgtatactacaatttattcattcattcattaacggacacttcagttgtttccatatcttcactatcgtgaataaggatgcaataaacataggcatgcaggtatctttataatgtagtgatttaatttcctttagatatatatccagaaaaggggtttctgggtcatatgatagttctattttaatgtctctaagaacctccattttgttttccacaatagctgaagcattctaaatctctatcagtagtgtacttgtctcttatgtttttgataatagtgattctaacaggtatgagatgctatctcatcatggttttgatttacatttccctgatgattagtgaggttgagtacttttcatacatctgttaatcatttttatttcttctttgaaaacaatgcctattcaggtcctttgccatttttaaattgggttaatttgtttttctgctatttagttgtgggggttttcaatatattttggatactaatcctttattggatatatggttgcaaacattttctcccaagctgtaggctgccttttcatgttgattatttcctttgttgtgcagaagctttttagtttgatgcagttctatttatttatttttgcttttgtagcctgagtttttggtatcatacccaaaaatcattgtgaaggccagtatccaggaggttttcccttatgttttattccaagatttttatgatttcaggtttttttttttttttttttttttttttttagcagagaacatgctttattgaggagtagatacagaagagcacattctaccacatgtggggaagggtttagcttctgtaaaaggcctttaccccttaagaaaacccctagtgaagttgcttttggataaattttaacagtgacactgaaactggaggggagctgccactgaacatgcttaaaattagctccctcaacccacagtgaatataagtagtgtacagagatgacaagagaaaggcacaaatgaccggagtcagggattgtggtgagggctccacatgaagacagcatgttggaggagaccaagttgggaagggtgacatgtcatacatcaaaagttgcccgaagatagcaggttataatgggctagagagaaattagagggaacatctcttccttcacttgaacaacaccaaaaatagaagaccagagaatagaaggatggtgacaaatcccaaaaaggaaatggaggaggagttcatggaaaagcagaagcactttaatcctagagggagggtgaggcactgtcgaaaagagaagcaaaccttggcaggggtggccattctgccttgctgagtcatgggctgagatacggaagtcactttcagtcattttcaacttctcccagggcattcagacaaaatcagtgcaaggtatatggaagtacagatgtactgtatcagactagtggaggtgaaaagttttctgcagtataattaaccagttaacatgcagcatgaaagggagaagtggacattattttggcatctgcaaacgtaaaaagtgggagtaaagagagaatgaaatatttactagtgggtactttacagtgaggcaaaaagtagtatccgctccctttcaccaagacactgcccactgcccacaggtgaactcaaatcaaacccagaaccaccacctcttcattcttctctccatctcattcagatcaattatatgctattaccatgactagtccctgggaaactcttcaaaagtatttggctctggttagcccaatacagatcaaaaagaggtctcttaatcaaaatgaaggaaagaaatttaaagcaagatggaacccaaagtgaatggaccccctgccaatctacacacaatcacaagtgccacctcttccctgcccctccatagaacacacatataaggagtaactggaaaggtcctggtggtggcagccatatttggaggtctggtgaccaggtggcaagcactagtaccacgcttagaagacacaatacaacctcatggggtgagaggacatgaggagagaaccagtgactggacaggtacagtaccataacagaactccttgggtcagtgctgagagacctgcactcaagtctaatacagatcccatccaggcaacctcactgaggccgaaacaacagttcctcagaaccagtgtctgcagtgtacacaaagatcggagccaggacagtcctgagggggatggccttcccaaaggatactgtacttgccaatcacaagagcaacagaaatgaccgacagatccctaaggtacggattcctactgctggggttcgctggctcggaatgacaggtcgctttaagggcccttgggaggggtccattttaagcagctgggatccatggttttattggagttggaccttttggcctctttggctatctactcatcaatcaggtcctgtctctttaaaactaggtgttttcccttccagtacttgagcacctgaagggcttgcagagtgctgacaatgtccacaggattcacagccgtctcctgactgatttctttgatagaaatctctttgccttggaaattacgcagttagcggagaagtacttctttccagtaactgcaacagcttataagccccagatctgagagtggacattctggggagccaactttttcttcaactttggaaagcaaataactgaaatcaataagcatcttgccatagccctgtctcatgtactgaggcatagtaaggatacaggatacgttgtagttgaggaatgaattcttttccttggaaaaatatccaatcaggtgacagccagtgttgtccgcctctgtcataacatagaacaggaagggctccacatcataatataatgtcttgtggtccagaaaaagtttggccagcaggcacaggttttggcagtagatcttgtttttcttgccatccacttcaaacacagagactgaacctttgcgatatatctcatcaccaagtgggtgtttccacacacatttggccatgtgctggcggagtatcatttggctcttcatatattttaaacagaattcacacatatagagacgtcccagccgtgcatattcttcaggatatggagaatggtaccaggtatcaaggtcatagcgaccaaaagcaattgttttaatcatgttgcttccctctgtgatttggccttgcagccttaacttctccaaatcctctgaagcccgggcttgtgctcttcggaaaagatccaagtcttactcgcttgtcaagttttctaaaagaggttcccctgtgttcccataggtctgtctgtgttccatggcagacactacaagaatcctttccaggaaagaatgatttcaggtcttttagccattttgagttgatctacagtataagggtccaattttattattctttttcatgtgcaaatccagctttccttgcacaatttattgaagagactattttttctccatgggttatctcagtacccatatcaaaattagctgtccagaaaccagaaatcctgagaggacccacagaccctctgaaggaagtggactgctcctgcaggacccgagagacaccccaaatactgtgagtgccccaattgcaaaagtgggaaagggagaacctcctctcctgaacacacacacacacacacacacacacacacactggagaaggtgaaggtctgtttgcaggagaagtttccgactttatctggagctgagtcagtttagagtgccaagtgaaaaacaggggtagagggagcagcagaaaggccctgggaccttgctgggtcccctagcaggccattcttgcctagcaccacagggatctatcggaagggtggctagaggagcaggggatacaacttcacagggagaaggaaatctccagctgaactttgcaacaatttgaacagggcaaggagcctcctggccagaactcaaggtagggcgcaaatctggtgtgcagactccacaggcgggggaggaaccaagcccttttcttctggagttgggaggcgggtaccctggggcaagttttcaagcctgactcaccctctgcctgcaaacagacttggggctgttggagggggcacggtgggagtgagacctgcccttcggttggcatgggagctgggtgaggcctttgactgctggctttcccccacttccctgacaatgccacaccttaaaattttggcaaacatatgaagaattttcaggatttatcactgtgttacctaatccctgaggattctacaagagtgtaatgctatacctctgtagcatatatagctaggatgatggtaatattttacttgaaaagtagatatacactatattacactatagctgaaaaactactgaattagcaaaattttaatagctttatccactattcttccagttaaaacgaattcaccatccaatggagaagactcatttagggtaggaacaatggtctgtagagtctgccttcacaatgtcccctcctactacaaccacttggttcagttccttgtcacttgatgactataccactataattgtctccttactgtctcatataccatgctgatatatcccatgcactgtcaacggatgaatcttcctagagtaaaattgtaatcacatcactctactgtccaaaaatctggaaagatgtcctagtacttagaaataaaggaaatatcttaccgtggtagtcaaatcccttcacagtatagcctcaaatagttttccagccttacctcaaatctttcctgtattttatgtcctacctaacgtggaacttttgtttctacctttctcatagcatttgcttgcacttaagaaatactgtgagaggtggagcaagatggcagaatagaaggcttcatcgattctctccacctcacccaaacaagaacatcaatttaacaactatctacacagaaaaacaaaacaaaacaaaacaaacctttatgagaaccaaaaatccagtgagcccttatagtacctgattttatctttatatcactgaaaaagacactgaagaaactcaaaaaacagtcttgaatcaccagtggcacccctcccctcaccccccaccctactggcaacaacagcctgctctagagagcatctgtgggtgatgggggaggaagaacacagcaattgtgaggcactgaactcagtactatcctgttagagcagaaaggaaaacccgaccagactcagctgacatctacccaagcagggagcatttaaaccagccttagcaagaggggaattgcccatcccagcagtcagaacttgagttcccacaaacctcaccaccatgggctaaagtgctctgtgctctaaataaactttaaaggcagtctagggcataaggactgcaactcttaggcaaatcctagtgctaaactggtcccagaaacagtggcttggcagagagtagggaggaaacacatggcctactgagacagaagctaaggcagctaagggagtgatgacatcattcctcacctaaccccaagctgcaaagctcacaactccaaaaatgcccacttctttccacttgaggagaggagaggaaagaatgggcaggattttttttgcatcttggataccagctcagtcacagtaggatagtgcactggtcagagttgtgaggctcccgttataagccctagctcccagatgacatttctagacacaagctgagaaaacagggcatctgctgccttgaaggggaggaagacacagtcctgaaaccattcatcccctgctaactgaagagcccttgggccctgaaaaactgacagagatacccaggcactaagtcaaggaccatggatgagcctctgagacttgctggcttcaggtgagacccagcatattaccagctatggtggctatagtgtgaaacgccttctgcttaagaaaagcagaggaaaaagtaaaggaaactttgttttgtaccttaagtaccagcatagcaacaggtgggtagagcaccaatagggctattaaggtccccaatttcaggacttgactcttggatggcttctcttgactcttggatggccagaaaggaggcaactgccctgaagggtaagtctcaggccaggcagctttcacaataagctaagatactataacactgtaactgcagtgtgtaaactgctcttatcctaagcagaaagaataaataataaacaaatcaaaaataattactataacaacttttcaaaacatacacactacaataagatgtaaatagaaaaaacaaaaagttaaaaggaggggaacaaagtcagggcatagagtttttattactttatttttgctgtttctttgtttatgcacacactgctatgttgttataaggttaaactaatgagttataagacagtatttgcaagcctcatagtaacctcaaaccaaaaaacatgcaatagatgaacaaaaaataaaaagcaagaaataaaagcatatcaccagagatcaccttcactagaggaagacaggaaggaaagaaagaagggagagaagaccacaaaacaaccagaaaacaaataacaaaatggcaggtgtaagtccttacttatcaataatattcaaggtaaatggattaaactctccaatcaaaagacacacattgccttaatgaattaaaaaacaagacctattgatttgttgcctataagaaacacacctcacctataaagacacacatagattgaaaataaagaaatggaaaaaaatagtccatgcccaatgaaaagcaaaaaagagcaggagtcactatacttctttcagatacaatagatttcaagataaaaactgtaagaagagacaaggaaaaccagtgtataatgaaaaaagggtcaattcagtgagaggatataacaattttaaatatgtatgcatccaacacaggagcaaccaaatatataaagtaaatattattagagctaatgagagataggcttcaatacaataatagctggagaattctacaccccactatcagcactggacagatgttccagacagaaagccaacaaagaaatattggactgaatctgcactatagaccaagtgagtctaatagatatttacagaacatttcattcaaaagttgcagaatgcgcattatttttctcagcatatggatcattcttaaggacaaaccatatgctaggtcacaacacaagtcttaaaacattcaaaaaattgaaataatatcaaccgtcttctctcaccacaataaaataaagctagaaattaataatgaggaatttttacaactatgtaaatatatgaaaattaaacaatatgctcctgaatgaccagtaggtcaatgaagaaattaagaagaaaattgagaattttcttgaaacaaatgataatgaaaataaaacacaccaaaatctatggggtacagtgaaagcagtactgagagggaagtttatagctataagtgatgaaaaacctgaaataaacaacctaatgatgcatcttaaagaactagaaaaccaagagcaaaccaagcccaaaattagtagaagaaaagaaataataaaaataagagtaaaaataaatgaatttgaaatgaaaaaatacaaaagatcaatgaaattaaaaggtggtttttttgtaaagtttaacaaaattgaccatccttttgccagactgagaaaaaaaatagagaagatctaaataaggaaagtcataaataaaaaagaacacattatatttgatacttcagaaattcaaagaatctttagtggctactatgagcaactatatgccaatatactggaaaactgagaagaaatgagcaaattcctagacacatatactctaccaagattgaaccaggaagaaataacaaacctgaatgagatcaaagccataataaaaagtatcccagtaaagaaaacccaggacttgatggcttcactgctgaattctacgaaacatttgaagaagaactaacaccaattttactcaaactatttggaaaaatagaggaggaaatatttccaaactcattctatgaggccagtattaccttccctaatgtcaaaacaagacaaagacacaacaaaaaataaaactacaggccaatatatctgatgaatgttgatgcaaaaatcctcaacacaatactgccaaactgatttcaacaatatattaaaaatatcgttcatcatgacaaagtggaatttatccctaggatgcaaagatttttcaacatatgcaaataaatcaatatgatacagcatatcaacagaatgaaggataaaaatgaaatggtaatttcaactgatgctgaaaaagcatttgatgaaattcaacattccttaatgataaaatttaaaaaaaaaaacaaaaacaccaaagactgggtatagaagaaacatacctcaacataataaaagttacatatcacagatcttcagcagctttcatactaaattgggaaaaattgaaagcctcagacaagaaaaataaataaaggacatccaaattggaaaggaagaagtcaaattatccttgtttgcagatgatatgatcttataagtggaaaaaactaaagactgcataaaaaattattagaactgataaacaaattcagtaaagttgcagaattcaaaatcaacatacataattcagtagcatttgtatgtgccaatggtgtgcaacatgaaaaagaaatttgaatattcccatttaccatggccacatataaaattaaatacctagaaattaaccaaagaagtgaaagatcgctataatgaaaactataaaacactgatgaaagaaactgaagaggacaccaaaaatagaaaaatattccatgttcatgggttggaagaatcaatatggttaaaatgaccataatacccaaagcaatctacagattcaatgcaatcaccatcaaaataccaatgacattcttcacagaaatagactaaaacaatcttatatgaaatcacaaaagtcccagaagagacaaagctatcctaagcaaaaagaacaaaactggaggaatcacattacctgacttcaaattatactacagaaccatagttaccaaaacagcatggtactagcctaaaaatagacacatagaccaaaggaacagaatagagaacccagaaaaaaaactaactacacacttacactgaactcatttttgacaaaggtgccaagaatatacaatggggaaaagatagtctcttcaataaatggtgctgggaaaactggatatccatatgcagaagaatgaaaccagacccctatctcttgccatatacaaaaatcaaatcaaaatggattaaaaatttaaatttaagacctcagactatgaaactactatgagaaaacagtgggaaaactctctaagagagggaaaatattattgagcaataccccacaggtacaggcaaccaaaataaaaatggacaaatggaatcacatcaagtttgatgattttaatatctggaatatctgtccaatgctgaaaatggggtgctgaagttttcagttattattgtgttgtggcgtatctttctctctagctctgataatgtttgcttaatatatctaggtgttccagtaattgaagcatatatatttaaaattgttctatcctcttgctgaattgaccacttttttattatatggtgatattctttacatcttttttaagcagagattgattagatttatttatttttattttttgtgtttttttttatttcaataggtttttggggaacaggtggtgtttggctacatgaataagttctttaggggtaattagtgaaattttggtgcacccgtcatccaagcagtgtacactgtatccaatgtgtagtcttttatccctcgccacccaccaccctttcccccaagtccccaaagttcaatgtatcattcatatggctttgcatctcataacttagctcccatatatgagtgggaacataaaatgtttggttttccattcctgagttacttcacttagaataatagtctccaattccatacaggtttctgcacataacattattttgttcctgttcatgccattttcatggctgagtagtattccattatatatatatatgtatatatatatgtatatatatatatacatatatatatgaaaatttggtatatatatatttatctactcattgattgataggcatttgggctggttccatatttttccaattgcaaattgtgctgctataaacatgcatatgcaagtatctttttcatataatggtctcttttcctctgggtagatatctagcattggaattgatggagcaaatggtagatctgtttttagttcattaagaaatctctacactgttttccatagtggttgtactagtttacattgccaccaacaacgtaaaagtgttctcttttcaccacatccatgccaccatctatagatttttttattttattatggccatttttgctggagtgaggtgctattgcattgtggttttgaattgcatttccctgataattagtgatgttgagcatttcttcatatgctttttggctatttgtgcatcttcttttgagaattttctattcatgtccttagcccactttttgatgtaattgtttgttttgttctggctgatttgtttgagttctttgtagattgtggatattagtcctttgtcagatgtatagattgtgaaaacttcctccaaccctgtgggttgtctgttaactctgctgattatttattttgctgcacagaagtattttttttaattttaataaactccaatctatttatctttgtttttgttgcatttgcttttgggttcttggtcatgaagtctttgcctaagccaatgtctagaagggtttttctgatactacctcctagaatttttatggtttcagatcttagatttaagtctttgatccatcttgagttgagttttgaatagggtgagagatgaggatccaatttcattcttctacatgtggcttgccaattaaatattccagcgccatttgttgaatagggtatccttttcctaccttatgtttttctttgctttgtcaaaaatcagttagctgtaactatttggctttgtttctgggttctctattctgttccactggtctctgtgcctatttttataccagtgccatgctgttttggtgactatgcccttatagtatagtttgaagtcagttaatgtgatgcctccatatttgttcttcttgcttagtcttgctttggctatgtgggatcgtttttggttccatatgaattttaggattgttttttctaattctgtgaagaatgatgatggcattttgatgggagttgcattgaatttgtagattgcttttggaagtatggtcatttttacaatattgattctatgcatccatgagcttgggatgtgtttttatttgtttgtgtcatctattatttttttcagcagtgttttgtagttttccttgtagaggtctttcatgtccgtggttaggcatattcctaagtattttattttaatgcagctattgtaaaaggagttaagatattggtttgattctcaacttggttgctgttggtgtacagcagagctacttatttatgtgcattaattttgtatcctgaaccattgccgaattcatttaccaattataggagtatttacataagtttttagggttttttaggtatatgattatataatcagcaaacagcagcagtttgacttcctctttaccaatttgaatgcccttgatttctttctcttatctgactgctctggctaggactcccagtactatgttgaatagaagtggtgaaagtgggaatccttgtcttgttccagttctcagggggaaagttttcaacgtttctccattcagaacagtgttggctgtgggtttgtcatagatggcctttattaccttaagttatgtcccttctatgcctattttgctgagggttttaatcataaagggatgctgaattttgtcaaatgcttttcatgcgtctattgagataatcatgtgatttttgtctttaattctgtttatgtggtatatcacatttattgacttatgtatgttaaaccatctctgcatccctggtatgaaacccacttgatcgtggtggattaattttttaatatgctgttggatttagttggctagtgttttgttgaggatttttgcatctatatttattatgaatattggtctgtagttttttttaatgtcctttcctggttttgatattagggtgatatgggcttcatacaatgatttagaaaggattccatatttctctatcttttgtaataatgtaaatataattggtagcaattctttgaacgtctgatagaactcagctgtgaatctgtctgttcctggactttttctgttggcaatttttaaattaccattttaatcttgctgcttgttattgttctgttaagagattctatattttcctggttaaatctaggagggttatatatttccaggcatttatccatctcctctaggttttctagtttatgatgcataaaggtgttcatattagccttgaataatcttttgcatttctgtggcatcagttgtaatatctcctgtttcatttctaattgaccttatttggatattcactcttcttttcttggttaatctcactaatggtctatcatttttatttatcttttcaaagaaccagctttttgtttcatttatcttttgggatttgggggggtttttgtttcaattttatttagttcttctctaatcttatttctttttttctgctgggtttgggtttggattgttcatgtttctccagtttcacgaggtgtgaccttagtctatttgtactttttcattcttttcgatgtagtcatttaatgctataaactcttctcttagcaccatttttgctgtagcccagagattttgataagttgtgtcactattattggtcagttcaaagaattttttaaatttccatcttgatttcattattgacccaatgatcattcaggagcaggttatttaatttccatacatttgcatagttctgtgggtttcttttggagctggcctccagttttattttactgtggtctgagagagtacttgatataattttaattttcttaaatttactgagacctgttttgtgtcctatcatgtggtctatattggagaatgttccatgtgctgatgaatagaatgtatattctgcagttgttgggtcgaatgttctgtaaatatctgttaagtccatttgttgtagggtataatttaaatccattgtttctttgttgaatctctgtgttgatgacctgtctagtgctgtcagaggaatattaatctcccccagtattactgtgtttccatctatctcatttcttatgtcttgtagtaattgttttataaatttgggagttccagtgttaggtgcctatatatttagaattgtgatattttcctcttggactggtccttttatcattatgtaatgtccctctttgtcttttttaactgctatggctttaatgtttgttttgtctgatataagaagagctactcctgctcactttcggttttctcacccctttaccttaagtttatgtgagtccttatgtgttcagtgagtctcctgaagacaacagaaacttcattggtgaattcttatacgttctgccattctgtatcttttaaatggagcatttaggcaatttacattcaatgttaatattgagatgtgaggtattattctattcatcatgctatttgttgcctgaataccttgtttttctttattgtgttattgttatatatgttctgtgagatttatgctttaaggaggttccattttggtgtatttcaaggatatgtttcaagatttagtgctccttttagcagttcttattttcaggcctgggtcctttccttcaaggcacaggttcccttctggtccaggatgcatctggaaattttgtctgggagctagggcctggaacatgggttcactactctgactggtgccctatcctgctgtggctgagctggtatccaagatgcaagacaattcatccacactatttcctctcctctactcacacagaaaaaaaagtgtcttttttggagctaagagctgtgcaatggggttaggggaatggtgatgccagtgctcctttgcccaaactgttgtctcagaatgctgcctgcatcccactccactgtctctgggtctagtatagtattaggactcacttaagagttggagtatttatggcctagactgtctttcaagtttacttggaaacagagatcgctgtagccctcagtggtaaggtttgtgggaactcaagtttggactgctgggattggtgatccccctctggctagagctggtttaaatgttccctctgttgtggcgcatcagctgagtttggacaggttttcctttctgctctaacaagacagcactgagttcactgcctcacaattgatgtgtactccctcactcagtgtccagagaggctctctgcaccatgaggctgctgccaggggtgtgggaggggtgttgtcagtgattcaggactgtttttctaactattcaatgcttctctcagcaatatgaaattaaaaccaggtactaggagtactcacttgatttttgcttcttatgaggattttttttttttcagcgtaattgttaaattggtgtcctcatgtgagcagggggatgatcaccttctattccgccatcttgcttccacttgatagttttacagtaaactttcaattcttatgagtttttttcttttctgattagatttatttccccagcacttaacagaaatttaaatttgaaataaaaatgttttatgcattacattttgaaaactaataaaattactattttaaaaattcaacctacacaatatcacctagtaaaataagtacaattaaaataataaattatatatttataaataagtaaaataattattattgagaaattttttaattaactacctagtaccctctctttaattttgtatcaatctaaattaattccagatagtaatgtatctccaaactttccttagaatttttttttttctggcatgctctaaatccagtactagtacatcactccataatatcaggccaattcaagtgaggggagatttttggctgacttattttatctgggtaatttattgcagtatgctttaaaaaaaacagcctacataaagtaatctaacatctactctatcatttatattctagtcttaattaataaataggagatgctatagttatctgatctcctttttgtcaccataaacatctatgttcaaaacaggtgccatggtatcaatgtatccctcaaagttcatgttcattgatcttcaatataacagagttgagaaggggacttttaagaggtgattaagtcagtggattaattttgttatctcaggagtgagttcattattatgagagtgagtttgttataaaagtgagtttggccatctcttgttctctctcactttcttgctcttccatcttctactgtgggtttatgcagtaagaaagtcctcaccagatgtggcccctcaattttcttggacttctcagcctctagaactggaagaaatgaatttcttttctttataaattaccctgtctgttgtatctgttataacaacacaaaattgactaagacaacagaccaaatagggcagaaaacaaacaatctgtaccttatgatcattctgtccatgaatgttgtgttgactctttgaccttttggaatacaaacccattcatctagctaaaccttcagcagttacatgctcctacctgttttatctaaacatgtttgaaatgtagcagggtagttcaacacttcaatggcacattctggttatctctgttccaccaatgtaaatctgttaccaagatgtttgttattcattttttatttttgtttctgctcttaatttcaaatccatctgttatgagttgaattgtgtttcctcttcctctaaaaaaaaagatctttaagtcctaaccccgcaatttctgtcaatgtgaccttccttggaagtaagatctttgcaaccaatcaagttaagatgaggtcattagaatgagtcctaatccaatatgaccatgtccttataataaagaaaaatttaaacacagaggcatgcagacttctagagtgggaagaggatgtgaagatgcagagacacagagagagaatgctatggaaagataaaagcagagagtaaagtgatgccagcaaacctccagaaactaggaaagaggtgtggaacagattatccctaacagccctcagaaagaaccaattctactgacaccttaatattggagttttagcctctgaaagtgtgacataataaatttctgttattttaagccactcagttttaggtaccttgttaccgcagccttaagaaactaatactccatcttttcccatgacagaaatatagcaaaaactatagtgtttctatcttgagaaattccattgtttctcaattaatcagtatgaagtaaatattcaactaattttaaaagaagagaaaaattatttccctatcagccaagtagctgggagcttagggacaatgttttatatagaaacaatttaatttaatgattccttggaaaggcattgtaacctgctacttgttaaaataagtcaataaggaaatttcccataaacttttttgagaaagcttgccctctacaaagaaagcattattggaacatgaactttaaaagtatatacacatgtgagcatgcacacatataattcaacaaaggcatgctcaattttgttatgttctaattcacaatgactacatgccttttcatcctaaataatttggtaattatttaaataacataggtcatttcttttacttctgcttcaaacttgaaggtgtcaatgaaaaaaaaatcctctacttagctttgccaatagcaacctgatctgatgccaaggcagagatgagactgtactttcatttcgtctaggttgcagtcttcagcctcgctaaataacataggtggtttctcatgcaaaagcacatgtaacattattttgaaatgcacacattcttctactttctatgaaaacacagtatttgctgtttaagactgtttaaggtcttcaatgcttttaagaactgagagctacatgagaaaataaagttgctgcaagattcatgttcacttcagtgggagttgcacaagtggaatgatggtcaggaatctgtcctaattagtaggcactcctgctttgctgcatcttagttatgccactgttaaattatactcagtaaattgaactatcttctagtctctgaagagattaatgttacatttggattgtgctgaatgccaaccattgatatttaacagagaaactttaagatatctttaagtagttttacaaatatatttcctatgatgaagttcattttttccttacacaagagaaaaagaaaaaggaattagaaatatttgttttaagattattatggaatatcacctaaagatgttaatgatatgttccctagaatattaataacttataaaaaggataaaatatttggataaggcttcaaaatgtcaccttcatgcagcaaactagtatttttcagaattatacttttttctgcccaagactgttttcatccaatctctctacaatttatccttgtgacattcctatcatgagatccgacgacggtcagatggaagaaactctagagactacatctccttaccttggctgcttcttccaaaagtacactcagaaataatttgttcctacacttgctcttatattggaataaattatcttaattaattgacaaaatgtaatgctagaatcaaaatcttcaagaatatatcagctaatcacattgaatgcaattaatatctttttagcctgaagggacttatagttgtcatacttttatcgtataatatgcaatacaaataatttgttaaaatcactttatcttcttctcattatggactccttggttcataaactatctttagatattttaaagaaactgtcttaagatatattatgaaaaatgctattttaaatgtcatatttagtatttcattaatgcatttgtttctaactgcaatcacaggaaacaaattattttgtttaagtaatacatacattatttaaaaagaagcatcaatacaattgtagcaattgaggacaagcaggctttaaataataccacatccggaaagacaatgtctttaagagattcgcaatgacattttcatatttctattgtatatattgacaggtagtttatagatcttccaaatagtttcaggaaagcattatgttgaaaaaattgtgtgtgtgtgtgtgtgtgtgtgtgtgtgtgtgtgaagttttatcacaggcacagagagaaaccccagtgctatcttaaagaaatgtgtctttcaccaaaagagcataaaactgcctttatgtattaagcgttggccacataatgacacaaaggccttctcagaccccacaaggagagctcttgacttctaggaagcttctttatcgaaacagttaagcattgaaaagaaactttaatggacttgatttgttttaagttaagaatctggtggtccatactataacagggaccatctttgtgcaggatagaggctaaataaaggccacacagctcttacttggctttcattaagaaaaattcaatcagttaaaataccttcctacttttctgtataagtcgtgcctatacccatttaaataatgccaggaaaacagaatgctaatctcctcatttatctaaaattataaaatattagtgtttcaaaagtaaacttataaatgaaaaaaacgaagaccagaaggaacatagttaaaaccacatactagttagtagcagaaccaagagctatatatcttgggcccctcaccaggaaaagctttagtaacacactgctttaactgcaaattttatttttttctttaaataattagaaactaaaactttttaaaataatgttgatagcttatattgtgttcagatactatcatcatatcaaagtcagaatgagatttaaactctgattattttcagtataatcttacaataaaagcactttttaatctgctcagtgagaatgtctgcattataatatctagttctcttacaaggtgaatagaggcatgatcacttatggaagtagtatatattatacacttcattgcttcaacttctaaggaattagaacagaaagaaaaatctgctcttggattagatagagaccaataaaaactaactggcttcttttggtacatttgatgactttaaatatttcctaatcttgaactcttttccacatagatattaaaaattttctgaaatacaattaattatgatgggtatattatctgggcaggtaaacaagtttttcattattaaaatactgggcctctgtgtttgcaatataaatgtggtgcataaaaagcttctcactgtctgcattgcatgttaacaatattccacatttaaattctcatttagcatcagaggtatatttttaaatgatattaaatcaatattcagtacctattatttgttcagtatgcatttagcactgtcttattctcaccagggattctatctccagatgatcataaatgttcattatcccggtctgtgaagtgagtttttgcataatgagtacctgtagacttttctctcttcgttcctccctcttcaatctattagcattgagacacgtgacttttagttttgtataaagcaaactgttgcgacggctagtggaacaacattgaatgttttatagcgtacaaacagaactcctcttttgttacgtaaacctaccttctctttatacattttttggttcctcttcagcttggtgcagtgtgaattttaaacagtaacagttttctttacatagaaggtctcccattactaaacatcctgcccctacataatagaggggctaaaacgatgtttagcaatctactcaagccatcaaagagtatgcattgcccaagggtatagattggctccttttagataacatgtctagggaaggttgctgcatggaggaccttacactggtaaatcgagtcaagacattattgttctggctgtaaaatagtacacatttgtaagtatttgcaagattacacatgctgggtctgagaatcaagctgaagggtcattattcagtttcatcatgactcagagctacttcaagatccagaaaacctttcaaatcagtaacttgaaaaaatgcattcaccatagtattagggctaagttacattacattttatttcaatgctgtgagaaatgaaagttatatgttgtatatacagcaacatttaattaacaagaaaacaaaattaaccaagaaactcaggctgctacaaatttattatcaactacagtttcttcatcttcaaaatattcctaatatactctttggtatttcccaatattccaaactatacaaaatctagaaaatttctctatttttgacacatgggaaattttaaaagataataaagtaccttccacccagaaaacacacaattgatacatgtcaactaagtaaaagacttattgaggtatagagcaagtcaatgttaaaattagaattaggtcacgcctgtaaccccagcactttgggaagccaaggcgagtggatcgtgaggtcaggaattcgagaccagcctggccaacgtggtgaaatctcttctctactaaaaatacaaaaaacattatctgggtgtggtgacgggtgcctgtaatcccaactactcaggaggctgaggcaggagaattgcttgaaacaagaaggtggaggttgcagtgagccgagatcacgacactgcgctccagcctgggcgaaagagcaaaactccgtctcaaaaataaattaaaataaaataaaattagaattaggtcttctttcaccttattgattaccttcaattcattaggtactatgttaagttctagggagaaaccaaaaggaataagatccatccactactctcaaaaagcagagaatctagtaaaggaaatgtgcacctggtgtacatatctcataattcactaattatacagcctttatcaaacatttactgttttctatattttaggtgctatactaggttccaggtatacaacaagaaattaaaatgcagtcactgcatagctgaatgcggaagaaaaccatagtaacagaaaaaaaataaatacacataatatacaacaaactgtcatgactagttactaaatggtaagtattggggatatgaactatgaaaaaaaatagaaatgttacctgtcctatggaatcagtctagtgacaatgtcagcgtttaaataatatttacaaaataattacaatagtgaggagtgttttaaaggaacagcgcaatatggtttgtgctatatttgatattagtataaggcagagtagtggcacaagttaagtggaactaacttcacctaaaaaactacttgaggggccgggcatggtggtttacccctgtaatcccaatactttgagaggtggagatgggaggtttgcttgagaccagcctgggaaacataggtaaacatcatctctaaaagaaatttttaaaaaattagctgggcatggtggtgtgcacccatggtcccagctactcgggaagcttaggtgtgggcggggggtgaggggtgtcgcttaaggccagtagtttgaggttacaataagttattatcacaccactgcactccatcctggaagacagagtgagaccctgtctcaaaacagagaaaaaaaaacaaaaacaaaaacaaaaagctacgtaagctggaccataaaggatatgtaggaatttgcaggatagaggagaaaaagagcattaaagaccagcatttacaaaggtcaaaataagctccttccagtttggaacagcccctcatatacccacaacctaataaaaaatttacaaagttttaatttgtttttcagaattattcttgtgatgtctagaggtttatcaactttcttaagttagacaaatgcagagtctagttacttcatctatcccaatacagtttactgtaattccaacagaaatatagtaaagggaacaaagaaattgttagccagtgatgaatcagaaaaggcactataaggaaagttcaaattgaagctaccatgaatgagtaggtagatatgtgtttactctacaggaagccaaggtgtaagaaatgttggagaacaaacttcatatgtacaaaaacagatatagcccaaacatttggaggcattgtgggaagaaaaaatggtgtctcatctaaaaatagctcgggatatgacccactaattgcaaaactaattgttgaatgtctagctgttgaggcattctgctagatttctcagactttggtcactgtccctgccctcaggaaatgtgcaaactagttgaaaagctaaagcaaaatacaaataatcatgctctaaggtagaatatgaaaatctcaaaaagagaagtacaaatgaaatatcctgagaagaaagaaataaaattaaatgaaaggaattgtaaaagaattcctaaaggaattagcattcaggttgaactttgagtactaagtaggatctcaacaggcagatatgtagggagggcattccagtcacaacagcaagattgaaagtatgaagatgatagtattcagataacagaatgttcaaataactcagtccaggtttgcttgagccttgggtatttacaagacagaaaactgaaaaggtaagtcaaaacaatattatagaagtcagaagagatttatctgataacactattttttaatgaaggaagtgatgcaatggagccaatacttagggaagattaatctaaaatagtttctatttaagacgcagcctgtctctctgaactcgtgatttgttaatcaataatagactacaactacatggaccatagattcactttggagtgataggaacagttgttctttagttaatgaaaactactactaacggaatgagatgttttgaataaaacagactgattttggtatttcctgccccactctcccagaagagacagtggcaaatgtctatctctaaaggcccactgggaagggacaatgcaaagtcatcccaaatggagagacgcacttggagaggtaggtggggaaagtagctgagcctgggtaggtgactgtgttttccgtggtctccaaatagctgagatacatggttttgagtctcaagagttgatggggaagagacgaaacttcaggtgagttccatctagagaacacatgagctagacctagtcccagccacaaaccttgtgcctgagcctgtcaaacaagaagcagtgctacagctcacaatggaatatgaaagctgggctaataagcacatcggcagggacatttgaaattctggattgcataaactaaggcctttttacaacctggggaggtaggacaggagacacaataataagtaatattaaatcttccccatggaatccataaaggggacttcaggtcagatttagtttggtttagaaaatgagagttgtttccagagtttatgataaggtaaaattaatacctgatacactagcagaagtttctggctttgatctagaaaatctgagttttaacagaaatcatcaagctctttaagaagccgcagcactactgttatttagctatgataggaaactacactggtatttgcatgctttgctgagtgcaatgatccctttttataaaacaacgagctttgataattctgttctcacaatggcaggtacctgtaacaaaacatctagctttctgacagaatagacacaggattctacccagttgacaggtttgggtttttttctgaatatatcaaaaggaagctatccttgactcatcctgcatgataagataaaacttttatttccattgaatttctacatattcccacccctgccactcctgcattcagtgaccactactaaaggaaagcacacacacacacacgtgcacacacacacacacacacattttagagaattcttctctttcatactttacttaatggggaaaattgccgccctagcatttcagtattggcaataagccaattattcacctcagtcctacagcatccctatgttccttggttaatgaaaattaccagcaagtctgtaactatgggcatgaattgaaaagtcttgggtcaacagttttagcacagtctagaaactactttctagtgccaaacgactagattagcctgagaaccatctatgggtcttcagtattctctgatgtataaaaaataataacttggttatacagagaatgtggtctctcttaacacttctctctctccaccctctatatgcctttttaaaaatctttcttttcatctttctgtccaccctaccaaagttccgagtcccaaatgcaaactcccgttccagattatatattcatcacagccagtgctcttcatagcctaatacaataaaatcaatgcaacaatgtcacttgtcagtctctttgtgcataagataaaatgatgccatctgtgagacaaagtaacatagggttatgagtcatctccaactcctgtaaaatagcctagtcagtctgggcctagggagaaaatgatgaagagagagcaatcagaaaatcagtgcactagtgattcatttgttaatttatagaaatgtgaagttcttttaagctgatatgggcagatcaactgacaaacctgctatgcgcatctgcacttttattatacttttattatacctgctaagcacacctgcatttttatgatagagtttgcctgaggccatcatagcagcaggaccgggaatacattagtaaaattagaagaaatatcatcaggcaacttcaggctgcatgtaaacaattaacagctcattaaggagaattttacttttgtgggagcctatccttcccttgaccaagtttaagctggctaataaatagaggcatccacaatgagggtcaggagtatctcaaattctgtgtccctgtttgactcaggattaactttaagcatacttattactctataatcatctattgaattatacacttttattatgacagtccaaccagaaaaaaaaacttaccttcctaaattcttttcacagtcccgcttctgtaatatccctatttgattctgaggtgtaagttaaatatactgaatgtatgcagacatattttagcctctggaaaaggttttaactgaaatgttagtgggaaatctaagaagcaaaagtgctgatgaagcaataaaatgggtacatattaaaagcaatgaaccctccccctcaaataagagattaaatggtgtataatttccaaactcttcaccacagtctcaatcaagtttagatttaccagcatcacaatctgcctaatacattcactgaagcactttgggatttatttgacagtttaaagctttcctcccaaattactaattaattggacttgagtctctaatgctaagtttgcttattttctaaatttttttaaaaaaaaaacaccttgatttacaaatctctaggtgaacttgaaatgcatactttgaaattgagcatatagttaaaaagaatggaatgtacaagatttcattgtataataaaatagtactatctgacatgcaggagtttagaacatataataattgaggtaaagaggtcttgtggtcctgcatccttgctgaaaaatgttggctttggatataattttaacctgtattgcactgtagtaggatttatttagtcattcagttaacatttattaaaacctcactgtgtgctaagcattgggctcctcagaggtacagggaggggttaaattggtttctgttctccaggagctcacattctacttggggagacagatgtgtaaatggctgatcacactgacaagggtcataaattatgtatgacttgagtgttgtgaggtcccaaaggaagaagcaacttcttgagggtgacaccactgaggtctctagtagtgactggcttgtatctctaggtatagtagagaatacacataatacacaaaatgacacataccatcttattctcttatagcatcctattcttttcctttggaacagttatatcaactgataattatgtgtgtgattaattcattaatgtctgtctttatgactagactatgaaaacctggaaggtagggactggtctgtttttgcttaccatccccggggcctattatgatgctggcacataatagatagtcagttattgtttggtgactattgaatgaaggaatatgtgttttcaagctatgggaagatatttattatgggaaacttcactacaatattattggctaccactttgcccttttaagaagcttattcttggattttcattcaaatagttcacccatccccaaacaggtagttatcctctgacgtaagcagacaaaactaacatgagcactaccacatgcacacctacaccacacaggttacacaacatatggtcgttacacaacgtatggtcattacacataggttatacaacaaaaatcacaccaagtcatgacatgcaacacagcttatcttttgggcactgtatgtcttagcacaacacatgtactttacccaccgcttatctcataagtacatgaacgtgtccttactcacactgtccccatgtcctcctttctctccttagcccttgtcactccccgcctgtgaaaataagtgaaggtttcatagaaaatgttatatttgctggagtcttggattgagcggactttattgaaatgaaaacttagataattttgatgttttcataaagagaaacttctgctctagaagcatccaaattcatagcaggagacatctgaccctagaaaatcacatcataatggaagcaaccatctcaaaataatatgcctaaaactttcatggggtgtttgtgaaactgaaatagtcactgaaactcaatataccccttgctttgcatggaaatgcataaaaattggccattatttgttaagaagaatatgggacaaagattaatcaaaatgtggtatagatatattcaaatggatgttgatggagtatctcaatgcctgtacttgacatgtaattgagctaaaaaaatctgaacattgttcccgaaatagccacatacaacacaactttttcatcttcttcatgtgtctaagacccagtgcatatatgacttcatccattaaaccctgcccaattacttagacctcaagtaatattcccttctctgaattcctgtaactcgcattgcctgtattacttattagacacttaatgtgtacagtactgtattattatctaacatttatgcatgttgaaaggccatcatccaagggattaaaaagaccaaaaccatgattttgcacaggatgaattcctgagaagactagagatatttaccttagagaagttttgaggatgggcaagaggtgatatgctaattatctttgactaatctgtgttcctatatgggtagcaaataggatggttctatagggctccaaaagataaaaccagggcctatggttaaaaactattgggatattattttcaacccagttcaaaaatgactttccagtagtcagatctgatttgacagagaatgggctaccgcctcaggagataatgaagtctctgctattaaaaatattcaattagagaagagttcaagagaaaacttaaggatcaaataagcaaaatgagatttagaaaccttttccactcagggattatctgatttttaatatgctttgccttctcaactactctataaatttcttaaagacccagactatcacatcactttccatccttggtacgtatttctttatctcaaacatagtagatgctcattaaacatttcttgatcaagacagaccctgatatcaatactgaaataaaactttaaatgtttgagacaatttttggaaagcagttaactacattaacaatataattaaaaatgcgctctgaatattccacaccatgaagtatcatgcaattattactaaccctaacagtatattaacaatagtattcatgatcagcaataaggcaatagcaattacattagtactgataatattagtgatatttacaatgattattaggccctgacaaattttagatggatacactataatcatacattgaataataacttcataccagtaaatcaatcagaaataaaatgaaactgaatgagttattaggtgtaagtgattatggaaaataaaaattgaaaattgtgacttagagtttgccagaaaatagaaccagtataagaaaagtttaacagaacttagaaataagttcaaaagagctaagaaaaataaggtcaactagtcagtctggacctaatgaatacgcagttgatgagatttcaaaaccaaccattgagggcgagatgtcaaaacatcaatgtagaaatcagacattcaacctcaactaagaaaaaagtacagttttaactaagaacaccttgacgtatgaagggtgcttgtgaactcaccctgtattgtataaaatatatcccaggaaatggaactcctgggaaataaaccaccaactcacaaagcctccttttcctgtctactgaatgtgtcattctagaataataatataaacagagggtgcatgagggaattttttgtgtgcatatacaggggattttgtgtggagctgtatatgtgtaaccaagaactgaaatatttgactaataaacctgttaaaatttattccaatagttttattggtaagcctaaaacaatctggttttcttcccaagaaccatgataaatccaaggactttcacaagattaacctaagttagaactggagtgttgttggaacttcaaggcagcttcaagtgacagctggagggagaatttcaatttttatcaaaataattgttttaaaagatgtgaggttataaccaggaaagtaagaaagcagtgaagtccaaaagggtgggtacttctaaccattgcaatgaggagaacaaaatgataccaaaaactggcaacgacataatccagccaagtgatactagcctgaagttgagaatgctgaaatattagtgtcccatttttcttctgtgtcagttcatggtccagggggatatccctgtagacaaagaagctcaaaagggccagatataagcaagcttgagatttcacattgtgacatatgttagctgtttcatttgacacttcttttccttaaagttattgtgtataccagaccatcaacctaatagcaataataaaatgagtaccatctattgagtttttcaatctatcagatgctttataaatataatttggtttttttttgaatcctcacaatttttaacctcattttacagatgatgaaatccaataattaaactaatcatacaaatgaagtaacatactaaagaacaattggctgggccaggttccttttgcctctgaagcctggagtggttctttccactccaatcttgcgaagtaaatattcagaatctgcattttaacacggttcccaggtggtttacatgcacattaaattggagaaactggatatcattctgctttcctgctgtttctctcatcagtcatacacaaacacaaacacacacactcacacactcacacttacacaaagagaatggggggtggggagagaaagtagtacaagtcattatctactttaaaagttagaaatatcgatacactttctctaacaacctctgcaaattttgaatacatctgttaatcaggctcattaaaataacatatatattttatcagctgttattagcattcagagtgtttactgaataaaataactttagataaaaatgaaacaccatattttacaacagtttatagaggagcataaaaagggagagaataaaggcatgagtcatacagaaaaacaggagtctgggtttgctgtggttcacactttgataataagtacaccagcaattacaaatgatttataaacggctgtggctatagaaaacccactgtctgtaataattgcaatccaagctttcatggagctattttccctgaaattgcagagagaatggtaccatgagaattcttcctgttttcataaattcaccatcaattttggttgccagcaaactttatttccaggtgctggacctttgcaatccaaattattgttattgaaaagaaaactgaatgagaaacaatctgcatttggtctaatttttcctccttaatacattttctaacataaactctcacttttctttatctatgcatctcaatgagtaggtaatttttaaattaagtagattggccctatttgaaaattctatttttatttcaatcttgagcatgctgaaatctgttgaatataatacctaatataggaattaaacaaatttagcatggatggttctcttttctaagactaatgccctatctcactgcttctccaaaatttttcttcatagttatcacctgagaaccttgtaaaaatgaacattcggattcagtaggtcttgggtgcatttctaacatcccaggtaatgtcaatgctgctggtccaagaacccactacactagcaaaggcactatacttaatttagcaacagtgaaatgtctaattttcagtccgctttttcacaaagcaaaactgagtcaccttttaaaataataaaagtaatacttagtcatgcattattatatacaacatgtaaaatcataaaagtaggaaaactaaacataatcttgccaaccagatataactattattaacatctggctgtatattcttccagtctttcttcaatgtacatacatctagttttacaaaatggatatcttgccattcattatcctttgatttaacaaccatatctagaccaccccaaatttttgcacagttttatatcaaacctccaaacctctcttcacagccatatgtatcacttagaaatgtgagtacaatactatcaaccacataattcaacaaagcaaactcaacagctttttatccaggtgttaatgcagaacagcaagaattctataaaaccttgaaaacggtgcagcataaatattaatagcataatgctgtcacagcttcatatgcactgggtatacacaggcagggcctcctctgctcaaaaatacacttcatttcttcagagtgttgcatttctttctaaacctgatctccagaggcatatttggggttattttagtcattctctcacattcactggggaccagcttccttagagaaacataagttttgttccgtttttatttttttctctctgcacggcttgctcgcctttcttgaccttttcttggcacgctgtagaccacagctgcttcaactgatggggcaagagtctgatgctctgctctgcccaggtgttccttttcattaacactgcatcaattcaggctgtcagacaggctgttatacccatgacaactaaacagttggtagaaaacaggtacaggtgggctaccagtcacttatacatgaatcgaaagggctactcttgtcactcatccttagtggcaaaatggtataatagaaatggattacgtgcaatattctgtgctatttagagatgcatgtgacaaactggaaaaatgaggatgcatactttaaaatttaaataaaagtactctgccaaaatgtaagcatgacaataaatgtgttttcttatgaaagccaggcatgatacaaaatcgttttttaaaaaataattttagctagggtagttaacacagtttgaaagattgagtaaaattatttggtgtcagaaatagaacaaactcctgtctggtaagctaataattttatgttagctatttctgggtatatcgtctctatgttagcacagcagttctcaaactttagtgtgtgtcagaatcaccaaaagaccttgctaaaacgaagattggcgggccccacccctagagtttttggttcagtagctctggagtggcatctgagaatgtggcatttctaagatcctaggtgatagtaatggtgctggaataataagaatgcttagagtcgtgcaataattcacactgctttagagaagcggttctcaaaccaaagttggcaaaagaataacttgagatgaaaagcttaataaaatgtagattctagtgtctcaacttctagcactttaataaacgattctgccacagatgggcctacatagtcaaccacattctgatgatattattaggttggtgcaaatgtaattgtggtttttgccattacttttaattattgtaaagagattgattttcacaactgaaagaacatcaaaatcacttaaactagagcttctcaaactttaaggcacatactaatcacctggaaatctgcttagactgtttcagtaggcctagggtgggacctaagattctgaattttcaacaaagtcccaggtgatactagaaagcctgttaataaactatagactgacaagtcccatcccagacatttttattcagtagaatgagaatatatttccaatttttaaaaatgcacccagaatacactcagtatatttaaattcttttggtcactccctgtaaccaaatattttgagattgatttttggagattcgatatagtaccagtaatattgtatgtttctgttgaaaaggcaaagcatctgaggcagatgagtggggatttttttgaaatgaaaaagacttgatgtgatagattgcattttccaaatgtctgcaacaataatccttatcccacatgcttttctacaacatagacttgatattcttcctattgagtggtaagttctatgtactctcctcttgaatctaagtgggcttttgacccccccatgtaattgacaggatgtcagagaagaaaagatgcatgacttcttgacttccaaggcaatgtcagaaaaagtgatgcagtctccatcttgttcttggaagactcctatctggagtcccaagccaccatagaagaatttgactacccagagtctgccacgctttgaggacaccaaaccacgtggagaggccaatcagtgaatctagataaaagatatataggaattcctaatactatgttgctcctgttggtagttctatgcttcagggccctccactttagggcaggacatgtgagtgaataagccttgaaataatcccagtctttgactatcaactcacacacagcctttgagtcttctttattgaggccctgaatattgtatagcagagagaagctatacaccctctgccctttcctacttcctgactcacagattccattaacataacaaaattcctattgtctgcatcactcagcttgaggtggtttgttactcagcaataacaacatgagccctaagacaatacaacttaataaaaccataaaattctccttaggaaacacatgagaaacttagacgtataaaccacttattttaggcccactgtaaagctgatgaaaagaaacgttatagctatagatctgcatgatataaatagctgacatgtatttgagtgttttttacatgccagatcctttatgtatgtatcaggggaaaaagtcaaaatgcctcttagagtattccggcagagggaaataagtttctactctctccccagtacttttccatttactaactattgccatgaaaattggctttctaaaaaaaaaatagatctatgaaaaggtaagcaataatttttaaaattacaatttttatataatttcacatcaaaagtttctaacataatattagaaacatatatgtactatttatccagattcactgattgcttatactttctatctttaaatacatatttttatatataaattatatgtaaattgtatatataaattatttatttatgtataagttacacataaaattatttataaataaattacattttacatatatatatatatcttcttaaactgtttaagagaaggttgaagtcatttggatatattgtacccctttattccaaatactttagtatttttttctgaaaataaaaacaaggagaggggccaagatgccctattagaagcagctacagtccatggcactcacggagaggaaaaaaaggggcgagcgaatacagcaccttgaactgaaatatccagattcttgcagtgggactgattagggaaacaatttgacccatgaagaacaaagaaaaacagggtggggtgacagcccacacagagccaagggacccccgacccccacccaaggaaagcagtgagtgattgtttgatcctgtaacaccatgcttcccccatggatctttccaacctgtgaatcagaagatcccctcgtgagctcatgccaccagaggcttgggtctgacacatagagctttgtggagccttggcagagcagcttctcaggcattcacagagacccaggagctttacatactctagccctgggaaccccaacaatcatgcctgcaactcaggcagggcaggaggtcttcacatacccctagggtagtgccagaatccagggaaccaagcagcatcattctgtgggccccatggcacctcacaagataagacccactggcctgaaattccagccggcaccagtaacacattggagccttccagagactggatggagcccccaggcagaggattgtgcaccatctctgctgtgtggttgactcagccattccagcctgtggtcttgggagagtccaaacttgggatgaggaagggtccccccagcagcgcagcacagtggctttgccagatcatggccagactgcttctttaaatgggaccctgatccattcttcctcactgagtgggacctcccagccaggctttccagcaatgccagcctgcatgcttaatggacagggctctgatttctctctaggaaggagtgcccaggagcagggagggccaccacctgggttggttggacgactcagccactgcagcctgtgggctttgaagagtctaagctgaccggggcagaagtggttccctactacaatacagatgttttgtcaaggcatggccagactgcttctttaagagggtccctaatcctattcctcctgactgggtgagacctcccaactggagtctaaatctacctcctacaggcacatgcaggccagcaataggtcaatgccttccctgggatggagcttccagaagaacgggcaggctgccaaacttgctgttttgcagccttcactggtgatatctccaggtacaggaaaagtcgaagcaactagggtctggaatggacctccagcaaaccacagcagccatacagaagactggccaaactgttaaaagaaaagcaaacagaaaacaacaacaacaacaaaaaccacaaaaaccccatccacaggtcggcaacctcgaagattgaaggtagataaacccataaagatgagcaagaatcgacacaaaaatgctgaaaattcaaaaagccagagtgctctttttccttcaagtgattgcaacacctctccagcaagggctcaaaactgggctgagactccaatggctaaaatgacagaagtaggcttcagaaagtgggtaataatggacttctgttagctaaataagcatgttgtaacccaatgccaagaagttaaaaatcatgataaaacaatacaggagctgaaagccaaaatagccagtttagagaggaacataaccaaactgctagagctgaaaaaaaaaaaaacactacaaaaacttcacaatgcagtcacaagttttaaaagaaaaatggttttttctttccatctttagtgcttccttcaggaagaaaaaaccattaccagccactacaaaaacacactgacatacacagaccagtgacactatgaagcaaccacataaacaagtctgcaaagaaacacctagaatcatgatgacaagatcaaatctacacataagaatactaaccttaaattgaaatgggctaaattgcccaattaaaaagacacagaatggcaactggacaaagaagaaagacccatttgtatgctgtcttccagagtcccatctcacatgtgaagacacacataggctagaaattaagggatgaagaaaatttaccaagaaaatggaaaaacagaaaaaagtaggcattgcaatcctagtttctgacaaaacagactttaaaccaacaaacatcaaaaaagacaaagaaggacattacataatggtaaagagttcaattcaacaaaaagagctaaatatcttaaatgtatatgcacccaatacaggagcacttagattcataaagcaagttcttagagaccttcaaagagacatagactcccatgcaataatagtggaatactttaacacatcactgacaatattagacagatcatcaagacagaaaattaactcagctctgtatcaagtgggcctgatagacatataccaacctctccaccccaaaacaacaaaatatacactcttctcattgccacatggcagttactttaaattggtcacgtaatttaaagtaaattactccttagcaaatgcaaaagaaccgaaactataacaaacaatctcagaccacagtgcaatcaaattaggacacaagattaagaaattcactcaaaaccacaaactacgtggaaactgaacaatccattcttgaatgactcttgagtgaataattatattaaggcagaaatcaagaagatcttttaaactaatgagaatgaagatacaatgtaacagaatctctgggatggacctaaagcagtgttaagaaggaagtttatagcactaaatgcctatatcaaaaaggtaggaagatctcaagttaaaaacctaacataacaactacaagaactagagaatcaagagcaaacaaaacacatagccagcagaagacaggaaataaccaagatgagagcagaaatgaaggagatagagacacaaaatccccttcaaaaaattaatgaatccaggagatgtttttctgaaaaaaaaataaaagagatagactgctagctagactaataaagaagaaaagagagaagattcaaataaagacagaaattatgagaggaatatcaccactggacccacagaaatacaaacaagcatcagagaatactataaacacttctacgtacattaactagaaaacctagaagaaatgaataaattcttccacacatatacccccccaagactgaaccaggaagaaattgaatccctaaatacaccaataatgagaactgaaattgaggcagtaaaaaataacctgccaacaaaaaagcccaggaccagacagattcacagctgaattctactagaggtacaaagaagagctggtaccatttccactgaatctattccaaaaaattgaaaaggaggtactcctacctaagtcattctatgagaccagcatcatcctgataccaaaatctggcagagacacacacaaaaaagaaaacttcaggctaatatttatgataaacatctatgcaaaaaccctcaacaaaatacttgcaaactgactccaacagcaaatcaaaaacctaatccatcatgatcaagtagacttcatccccaggatgcaagattggttcaacacatgcaggtcaataaatgtaatcaagcacataaacagaactaaagacaaaaccatgtgattatctcaatagatgcagaaaaggcatttgataaaattcaacattccttcatgataaaaaaaactctcaatgaactagatattgaaagaacatacctcaaaatataagaaccatatatgacaaacccacagccaatataatactgaatggggaaaagctggaagcattctccacgaaaactagcacaagacaaggatgccatctctcaccactcctattctacatagtattggaaattctggctcaaagaaaccactgctcaaataaatcagagatgacacaaacaaatggaaaaacattccatgctcttggataggaagaatcagtatcatgaaaatttccatactgctcaaaccaatttataaattaaatgctattaccattaaactaccattgaccttcttcatcgaattagaaaaaaaaaactattttaaaagtcatatggaaccaaaacagagcccgaatagccaagacaatccttagcaataagtacaaagctggaggcatcatgctactcaatttcaaactatattacaaggctacagtaactaacactgcatggcactggtaccaaaacagacatatagaccaatagaacagaacagagacctcagaaataacatcaaacatcaacaaccatctgatcttcaagaaacctggtaaaaatgagcaatgaggaaagtattcctgatatggtttgactgtatccccaacccaaatctcatcttgaattgtagctcccacaattcccatgtgttgtggaaggaacctagtcgagggtaattgaatcctgcaggcaggtctttcctgtgctgttctcatgatagtgaataagtctcatgagagctaatggtttttataagaggaagtttccctgcacaaattctctcttgcctgctgctatgtaagacaagactttgcttttcctttgccttccgccatgattgtgaggcctccccagccatgtggaactgtgagtctattaaacctctttccttcataaattatccagtctcaggtatttgttcatagcagtgtgaaaataaactaatgcaatttcctattaaataaatggtgctgagataactggttagccatatgcagaaaactgaaacagaaccccttccttacaccacaaacaaagatcaactcaatattgattaaagtcttaaatgtaaaacacaaaactataaaaaccataaaataaaacctaggcaataccattcaggacataggaacgggcaaacatttcatgatgaagacaccaaaagcaattgcaacagaagcaaaaattgacaaatgggatataattaaactaaagagcttctgcacagtgaaagaaactatcatcagagtaaacagacaacctaaagaatgagagaaaattttttcaatctacccatctgacaaaggtctaatatccagcatctacaaggaacttacataatggtaaagggatcaatgcaacaagaagagctaactatcctaaatatatatgcacccaatacaggagcacacagattcataaagcaagtccttagagacctacaaagagacttagactcccacacaataatagtgggagactttaacaccccactgtcaatattagacagataaacaagacagaaaattaataagcatatccaggacttgaactcagctctggaccaaggagacctaatagatatctatagaattcttgacctcaaataaagagaatatacattcttctcagcaccacacagcacttattctaacataaaccacataattggaagtaaatcactcctcagcaaatgcaaaaaactgaaatcataacagtctctcagaccccagtacaagcaaattagaattcaggattaagaaactcactgaaaaccgtacaactacatggaaagtggacaacctgctcctgaatgactactgggtaaataatgaaattaaggcagaaataaataagttctttgaaaccaatatgataggagaacaatgagaacaaagatgcaacataccagaatctctgggacacatctaaagagatgtttagagggaaatttatagtactaaatgcccacaggagaaagcaggaaagatctaaaatcaacaccctaacatcacaattaaaagaactagcaaagcaagagcaaaccaattcaaaagctagcagaagacaagaaataactaggatcagagcaaaactgaaggagatagagacaagaaaaacccttcaaaaatcaatgaatccaggagctgggtttttgaaaagatcaacaaaatagatagaccgctacccagactaataaagaagaaaagagagaagaatcaaatagacacaataaaaaatgataaaggggagatcaccactgatcccacagaaatacaaactaccatcagagaatactataaacacctctatgcaaataaactagaaaatctagaagaaatagatacattcctggacacatacaccctcccaagactaaaccaggaagaagtcaaatccctgaatagaccaataacaagttctgaaattgagacagtaattaatagcctaccaatcaaaaaaagcccaggaccatatggattcacagctgaattctaccagaggtacaaagagtagctggtagcattccttctgaaacttttccaaacaatagaaaaagagggactcctccctaactcattttatgaggccaacatcatgctgataccaaaacctggcaaagacacacacacacacacacacacacacacacacacacacacacacaaagaaaatttcaggcaaatatccctgataaacattgatgtgaaaatcctcaaaatactggcaaaccaaatccagcagcacatcaaaaagcttatccacaatgatcaagtcagcttcatccctgggatgcaaggctggttcaatatatgcaatcaataaatgtcatccatcacataaacagaaccaatgacaaaaaccacatgattttctcaataaatacagaaaaggacttcgataaaattcaacacctcttcacgctaaaaacactcaatgaactaggtattgatggaatgcatctcaaaataacaagagctatttatgacaaacccacagccaatatcatactgaatgggcaaaagctggaagcattccctttgaaaaccagcacaagacaaggataccctctgtcaccactcctattcaacatagtattggaagttctggccacagcaatcaggcaagaaaaaaaataaagggtattcaaataggaagagaggaagtcaaattgtctctgtttgcagatgacatgattgtatattgagaaaaccccattgtctcagcccaaaatctccttaagcagataagcaacttcagcaaaatctcagaacacaaaatcaatgtgtaaaaatcacaagcattcctattcaccaataatagaaaaacagagagccaaatcatgagtaaactcccattcacaattgctacaaggagaataaaatacctaggaatacaattaacaagggatgtgaagaaacttttcaaggagaactacaaaccacttctcaaggaaataagagaggacacaaacaaatggaaaaacattccatgctcatggatggaaaaaatcagtatcatgaaaatggccatactgctgaaagtaatttatggattcaatgctattcccatcaagctaccattgactttcttcacagaattaggaaaaactactttaaatttcatgtagaaccagaaagagcccatatggccaagacaatcctaagcaaaaagaacaaagctagaggcatcatgctacctaacttcaaactatactacaaggctacagtaaccaaaacagcatggtactggtaccaaaacagatatatagaccgatggaacagaacagagaactcagaaataacgccacacatctaaaaccatctgatctttgacaaacctgacaaaaacaagaaatggggaaaggattccctatttaataaatggtgttgggaaaactggctagccatatgaagaaaattgaaactgaaccccttccttacaccttataagaaaattaactcaagatggattaaagacttaaatgtaagacctaaaaccgtaacaaccctagaagaaaacctaggcaataccattcaggacataggcatggccaagacttcatgattaaaacaccaaaagcaatggcaataaaagccaaaattgacaaaagtgatctaaataaactaaagagtttctgcacagcaaaagaaactatcatcaaagtgaacaggcaacctatagaatgggagaaaaattttgcaatctatccatctgacaaagagctaatatccagaatctacaaggaacttaaacaagtttacaagaaaaaaacaaacaaccccatcaaaaagtgggcaaatgatatgaacatacacttctcaaaagaagacatttatgtggccaacaaacatatgaaaaaagctcatcatcactggtcattagagaaatgcatatcaaaaccacaatgagataccatctcacaccagttataatggagatcattaaaaagtcaggaaacaacagatgctggagaggatgtggagaaataggaatgcttttacactgttggtgggagggtaaattagttcaatcatcgtggaagacagtgtggtgattcctcaagtttctagaaccagaaataccatttgacccagcaatcccattacggagtatatacccaaagaattgtaaatcattctactatgaagacacatgcatatgtatgtttattgcagcactattcacagtagcaaagtcttggaaccaacccaaatgcccatcaatgatagactggataaagaaaatgtggcacatatacaccatggaatactatgcagccataaaagaggatgagttcatgttcttcgcagggatgtggatgaagctggaaaccaccattctcagcaaactaacacaggaacagaaaaccaaacaccgcatgttctccctcataagtgggagttgaacaatgagaacatatggacacagggaggggaacatcacacactggggccttttgtgggggtgagtggctaagggagcgatagcattaggagaaatacctaatgtagataacgggttgataggtgcagcaaaccaccatggcacatgtatacctatgtaacaaacctgcacattctccacatgtatcccacaacttaaatataataaaaaaattgacccctttatcattacatagtgaccatttttgtatcttcttatagatttgtcatgaaatctattttttcttatataagtatagtgactcctgcacgtttttgtttccattggcctcaagtatcttttctagccctttattttcaatctatgtgtgtctcagttaagcttttattgtcaaaattgtttcagaagcacttttactatataaatctttgttcctcaattttctcttcatgtgcctgtcaacatcataatcagtctttaattaatgagatgaataaaatgtttaactgtcatttatttatgatttgtatgagagtcatacttttaactttttaaacattatattttagtaggaatttttacatcaaaaactcatcacgtcctttaatcaaaactgctttaccttttactttttatgctttgtaatacttttttgctttattacattgttttgaactcttgtacaataaaatattctgtctttatattttttccagtactttttgaatgtgtttgggattggtgctgcatatgtttaagtgagatggaactgcacgatttgttttttaaaaatcttcttaacttgtccttttagtcaaaaacccaagctatccctgccttgcccccagatccttttctcacagaataatctaagagttttgagaaacagagaaatttatttctgtacattgcagagcaacagaaatctgggatttgttaccaggatcttgatagtgaatgtattagttcattttgtattgctataacagaataccacaaactgagtaatttataaaatatatatataaaaatctatatatatatatgaaatatatatatcttacaattctgaagctgggaagtccaatctcaaggggcttataactggtgaaggtcttcttactatgccatctgtagaataacaatacagcacttgtaagagagcaaaagaacaagagggggctgaacttgcttttataacaaggccactttcttgaaaattaatccactcctgcaataacccattcctgtaataacccaatcctaaaatagcattaatccattcaggggggcaaatctctcattacctaatcacttatttggcctcacctcccaacactgttgcattgggattaaatttgcaaaacataaactttatgggatatagtcaaaccatagcagtgagactcaaaaataacaataaaaatattcaggaaatagtgatatctaacttgcactagaccttttctcttttgggcaaaaattacccatcattcccccaaattttcccatgcattttggttatacacgacagtgttttgatggatttgtattgaagaataatgaagatattattttccatgcttagaatgatgtagacaacataacagttgcaggaagtaagatgacatcaggtatcaaaaaacatattgtaataataatttggaggtggtaggtatcaggagaacagaaattctttcacatacatccccacccccctccacacacacatatacacacagagagctactcttctcataaattctcgaaatattgcagagcctggtgatagtccaacaatatagaaaaatagaaggataaagtcaaattgcttcaatattaaaggaaagtgtgaatccagaaaagtggagaatgtgtagattttggggttatgcatatatcatctcatacagcctcaacattattatcttaaatttcatatattagaagtttaggctaacagaaatggttatcgaataggaaatgcaaatagccaaaagacatatgctcattctcactattaacaatgtgaatacaagttgagataccatgttatatttctcacgttcactaaattaaatgcaaaataccagatataagtgaggaggtggaagaagaggaccttgtttcttggaccataaattggtatagcctttaggagataagtttgaagatatctaatgtatttgaggatatgtataatctgagactctgcaagtctacttttaaagtgtacaacccagagaacagtcatacacgtgaagcattcttactgtagcttttttttgtaatacttaaagactgaaaaaatattctaatgtccatcagtagaagaatgatccaataaacagttacagtcatacaatgaaatatcataaaacaataagaaaagaatgaactagaactacatttgttacatggcaaaatctcaaaaccatagcatgttgaaaagtttcagaaggatatctgtgtgtgtacaacagaacatttatgtaaaatgcaaaaatgcaagactactaattaaatattttatgtgtacatatttattttaaatgtgtacttcatcaacaaatgaatgaataaagaaaatataccaatattccattggtatatatacacaatggagtactattcagccttaaacaaaagaaggaaatcctgccatttgtagcaacatagaaaaaccttgttccttggagcataaattgaagtgaaataagccataaattggagtgaaataggcataaattggagtgaattggggtaaaataagccaggtgcagaaaaacaaataccacatgatctcacatatatgtacaatctaatgaagttgaactcagaaatagaaagtaaaatagtggtcaccacaggctggggggtgggaaaattgagaaaatgttggtcaaaagaaacaaaattttagtttgacaaaagaaataagttcaagagacctattatccatcatggtaactacagtttataacaatatatagcatacttaaaaattgttttgaaagtagattttaagtttacccaccaccaaaatggtatattaggtaatgcctatgttaaatagcttgatttagccattccacaatgcatatatatgtatatatacacatatacacatatatatcaaaacatgctgtacatcatagatatatacaatttttatttgtcaattttaaaatacataaatgtgaggggacatcagcaagacagcaaaataggatgctatagaccctctttcccctagagagaccctgagttaacaacaatatagggaccagaataactgagaactctagagactagttaggaagctatggaacccaggttattgtaaaacccagaagggattccagtgaaaggggtagaaaaaatcattgcattttgtgcacctgtttctgtccctcaccctatgttacatagcacagagcaataaggagaaaatccctcatgtctgggctcctccctcaggagaaaaacaaaagagtgcataaaatgttctaacttcccttggggcttcctaaggaaaggtttttctgtcttgcctgatttggagtgctgatgggacagcagcagagtttggaagccactgaagaaaggggtaagcagtgcattagagctgcagttctacagttaaatgccaggagatccaagagattggaaagttctgagaggtcctggaacctccaaccaggctgactggtgaagatctttccctgcacaaagccaataccacaaagattaggagaggtggctttttttttttcttcaaaatgcccaaatcccaacaaaaaataacaaagcatataaagaaacaggtaaaagtggcccaatcaaaggaacaaaataaaactccagaaaccaacactaaagaaatgtgtaccaaggggctactcaaaaaaagaatttaaaataactgtcataaagatgctcaatgatccaaaagagaacagatagacaactaaatgaaattagaaaaatgattagtaaactgagaatatcaataaagagaaactctaagaaaggaccaaataaaaattctggtttaaaaatataataactaaactaaaaaattaaaagggttcaacagcagacataatcaagcagaatcaagtccagtaacttaaagacaatttatttgacatcattgagccaaagggcaaatgagaaaagagaatgaagaaaagcaaaatagcctaagagacttatgggacactatcaagctgggcaatatatgcattataggggcaacagagggagaagagagggggaaaaaaagaagcatagagcgtattaggagacatattgggataaaactcccaaatctgaaaaaagaaaaagattcaacaggttcaaaactgtgataaaaccaaagagaatcacatccagatactttataatcaaactgtcttaagtcaaagagggagaatcttgaaagcaacaagagaaaagtgatttgtaacatacaagggagccccaagcatggaggttttgtatgcaattgaagttaagttgttatcagtttaaaacagacaattacaaatatgaaaggttttatgtataccccatgataaccatggagaaaaaacctacagaagatacataaaagaaaaagaaaggagttaaagtatatcaataccaaaaaaaaaaaaaaagacgaagacagcaagcgaggaaaagagggacaaaaactccatgatagtgagaaaacattatgatattggcaataataagtccttagactcgctttagatttaaagacacacatacactgaaagtaagagaaacagataaatgagggtgtcacaactacaaatttggtaaaggatagtctcttcaacaaatagttttggaagaactgaatatatacttgcaaaggaataaaactggacccttaacataccccatacacaaaaatcaactcaaaattgattaaagatttaaatgtaaagcctgaaagtataaaactcccacaacaaaacataaggggaagtcttcatgacactggtcttggcaatgacttcttcgatatgaaataaagcacaggcaactaaaacaaaaatagatcagtgccatttcatcatgaaaaaaagcctctgaacaccaaagaaaacaatcaacagagtgaaaagacaacctacagaatggaaaaaaatgtttgaaaaccatgtatctgaaaagaagttaatatccaaagtatataaagaacacatataaataaatagcaaaaaaccaagtgaccttatttttaaaatatgggcaatggacttgaataaccatttctccaaaaagcgcctattggttgacaggtaaattaaaagataatcaacattactaataatcagggaaatgcaaatcaaaaccacaatgagttgtcacctcacacctgttaggatggtaacatgatttggctctgtgtccccacccgaatctcactttgaattgtaataatccacacgtgttaagggcgggaccaggtgaaggtaattggatcatgggggtggtttctcccatgatgttctcatgataatgagtgagtcttatgagatctgatggttttataagcatctggcatttcccctgcttgcactcactctgtcctgccaccctctgaacaaggtgcttgcttctcctttgccttccaccatgattgtaagtttcctcaggtatccccagcaatgtgaaattgagagtcaattaaacctctttccttcataagttacccagtctcaggtatttcttcatagcagtgtgagaatggactaatatggatggccattatttaaaaaattacaactattggcaaggatgtaattggtgaaaacataaaatgattcagtcactatggaaaacagtatggagtttcctcaaaaaattcagtaatcccacttctgggtatatatccaaaagtgttgaaatcaggatctcaaagagatacatgcaatcccatgttgactgctgtattatttacaatagccaagatatggaaattacttaaacattcatagatgcatgaatgaataaaaaatattgtatatacatacaatggaatactattcagctataaaaagaaggaaatcatactatatgaacctggaaaacattatgctaagtgaaaaaagccaatcacagaagaattaacactgtatacttccacttctatgaggtacctcaaaaagtcaacctcatagaaacaaagagtagtttggtggttgccacgcgctgaggagaggagcaattggggaatttctgttcaattagtataaagcttcaattatacaagacaaataagttttaggatcctgctgtactacactgtgcttatagttaacaatattacattatgcacttaaaaattctgataagagaacttaacatgcaatatacatttttatgacattaaacacacacacacacacacacacacacacacacacacacacacacctcaacaaagtccaggactaaatgacttcactggagaattttgtcaaacatttaaaagaaaagtccttccttcaggagctcttttagggcaggcctggtggtgacaaaatttctcagcatttgcttgtctgtaaagtattttatttctccttcacttatgaagcttagtttggctggatatgaaattctgggttgaaaattcttctctttaagaatgttgaatattggcccccactctcttctggcttgtagagtttctgccgagagatccgctgttactctgatgggcttccctttgtgggtaacccgacctttctctctggctgcccttaacattttttccttcatttcaactttggtgaatctgacaattatgtgtcttggagttgctcttctcgaggagtatctttttggcgttctctgtatttcctgaatctgaatgttggcctgccttgctagattggggaagttctcctgtaaactagttcaacccttgtggaagtcagtgtggcgattcctcagggatctagaactagaaataccatttgacccagccatcccattactgggtatatacccaaaggactataaatcatgctgctataaagacacatgcacacgtatgcttattgcggcactattcacaatagcaaacatttggaaccaacccaaatgtccaacaatgatagactggattaagaaattgtggcacatatacacatggaatactatgcagccataaaaaaatgatgagttcatgtcctttgtagggacatggatgaaattggaaatcatcattctcagtaaactatcgcaagaacaaaaaaccaaacactgtatattctcactcataggtgggaattgaacaatgagaacacatggacacaggaagaggaacatcacactctgaggactgttgtggggtgggggaggggggagggatagctttaggagatatacctaatgctaaatgacgtgttaatgggtgcagcacaccagcatggcacatgtatacatatgtaactaacctgcacattgtgcacatgtaccctaaaacttaaagtataataataataaaataaaaaaaaagaaaagttaacaccaatcctcccaaaactcttccaaaaagttgataagaagggaatactttcaaactcattctactaatccagtgttagccatgatacaaaagccagaaaaagatactacaagaaaagaaaacttttcagaccaatatccctgatgaagattgatgaaaaatattcaacaaagtattagaaaattgaattctacaatacttcaaaagcattatataccatgaccaagtaagattaattcctggaatgcaaagatgttgcaatatgcaaaaattaataaatgtaatacaccacgtttgcagaatgaaggacaaaaaccaaaaccacatggtcatctcaattgatgcagaacaaaagtattcgacaagattctacacccttaattaaaaaacttcataaaaaagaaatagaaaaaaaatgacttaaatataatactctttatgaaaagcccaaagatttttactttttttggataatactcgatgatgaagaccgaaagcttttcttccaagatgaggaacaaggcaaagatgactgctatcaaaacttctatgccacatagtcttggaagtcctagcatgaaaaattaggcaatgaaaataaacaaaagtcacccaaactggagaagagaaagtaaaattatctttgtgcacagatgacacgatctcatatgtagaaaatcttaaagattccacagaaagcctgaattcagcaaagttacagggtacaaaatcaacatacaaaaatcaattttgtttctatacactaacaatgaataatctgaaaagaaaattaataaaacaattccatttgtaataccatcaagaataaaatacttaggaataaacttaaccaaggtggtgaaagacatgtacactgaaaacaataagacattgatgaaattaaagaaatcaaagaaatggaaagacaaatccattctcatgaattggatcttattatttttcaaatgtgcataatacccaaaatgatctatagatttaacacaattcctgtcaaaatccaactgtcatttttccagaaaaagaaaaattcttcctaaaattcatatggaatctcaatagacttaaaataaccaaaacaatttttaaaaagaacaaaattgaagggctcacacttcctgatttcaaaacttattataaagccacaataatcaaaacagtgtggtactggtataaagacggacaaatagatgaataaaatagaacagagaccccataaaaaaaacccttgcatatacaatgagatgggatctggtgcattctgagtggtatggccatagtccatagtcctttttttttttttttttttttttttttttttttgaggtaaggccttactgtgttgcccaggctggtctcaaacttctaggctcaattgatactcctacttcagccttctgaatagctaggcttacaggaacacaacactgcagcagcttagatggtcaaatggtcttcaacaagggtgccaataccactcaatgggaaaagaacagtctcttccacaaatggttagaggaaacactttcagtcccatccagttaggaaaactgtatatctacatgcaaaagaatgaagttgaacacttatcttacagaatgtacaaaaattaactttaaaatggattaaagacataagcataagacctaaaactataaaattcctagaagaaaacaagggaaaagctgtatggcattggacttggtgatgatatcattgatatgacaccaaaagcatacacggcaaaagcaaaattaaactaataggactatataaaacttaaaatattttgtgcagcaatggacacaatcagccaggtgtggtagcacttgtctatagtcccaactactcgggaggctgaggcaaaaggctgaggcaggaagatcagcctgtagtgaattatgccaatcaagtgtccacactaagttcagcattaatctggtgaactcctgggagcagggtatcaccaggttacctaaaaaagagggaacttgcccaacttggaaatgaagcatgtcaaaactcccatcctgatcagtagtgggattgtgcctgcatatagccactgcactccaacctaggcaacacagcaagacctggtccattgcaaaataaacaaaaaagacacaatcaacaggtggaaaggcaacctacagaatgggagaataggataaattattcgtgaaccatatatccgattaggggttaatatccagaatatataaaaaaactcactcctacaacttaataaaaaagtcaaataacctgatttaaaacaggcaaaaaaacttgaataaatgtatctccaaagatgacatacaaatggccaacaagcatatgagaagatgctcaacatcagtaatcatcagaaaaatgcaaatcaaaaccacaatgagatattacctcacactgcttagaatagctattatcaaaaagacaaaagataccaagtgttgacaaggatgtggaaaaattggtatccttgttcactgttagtgggattgtaaaatgatgcaattgctatggtaaacagtatggagtttccccataaaatcataaatacaagtaccatatgatccagcaatccaacttctaggtatacactcaaaaaaattcaaagaagaatctcaaaaagatatttgcatacccatgtttatagcagcactattcatagtagctgagttagaagcagtccaaatgtccatcaagggatgaatagataaacaaaacatgatatatatctagaatagaatattactcagcctaagaaaggaaggaaattctgtcacatgatatatcatggatgaaccattagtatattatgctaggcgaaataagccattcacaaaaagacaaatactgtataattccacgtacatgaggtatttaaagtaatcaaatttatataaacaaaaagtagaatggtggttactggggctggggaaaaggcaaaaaggggagttgtttaatgggtgtagaatttcagacttgctagatgaaaaagtcatggagatctgttttatatcaatgtgaatatacttaatactactgaagtatacagttaaacatggttaattttgctaattttgttttttaccataataaaaaaaagtataaagtcctgcatgggatggatatattacaactccagggtagctttttcagtggaggataggaggtgaatgaaattagggcagggcaactttatttattataaataaatctgaatcaaataataaaaacgttaatattttcaaacatggatgaagagtacgtaagcatttactatattatatcctacagttttttgcttgaaatataactatgcaaacattcttttcaatcttgaaatttatgaaaatgtattgtccaagttttcacaaatagtaaaagaaagatttgaatttgtctgcctaattttaaattccttaaaagaaactcctattctgaactaatgattgactaaattactgagagcacctaaaaaggtagtctgatttttcttctctatttatctagtaacagcagcattttccaccatgcctccaacctagagagttgattaccagctaaatgaattatgtttgttggaaatcctcagtttccaaactaatttcttgccaattcctacttgcacacgatatatcatttttatctttgctctatacttactatttagctatctatttatgatatactaaatgcctagaagtttcccctatatttttcattcctcaaatatagatccctgcaaatctcaagcttaattgaatatgtacatagaatagtcaagttaggcaatcatgttgacataggaacatgcccaggagttgagagtgaaaaccactcttcatcttctgtgcactatatgctttgattccactgaatagtgatctacttgtaagtgctgattttgaggaatcatcattatttctagattttattgcttatcacttggcattggccatactattatgtcagatcatttatcaaccacactaaagttataaagttattgactacacagtttagttttggcttattttactaaatatttaataaattccttttttagagacaaaaattcaattcttcaaagtaatctatgtttattatgtaccaaataagagaattctatttggctccattgacttaaagaaatctaatgtaagtctttatctaatactaacagtgatctcattttccatggtccatatccagaaataatttttactgataaggaacattgggatttctgtgaaactaattctgtatctgtcattatcattaatttatttgtattgcctaagtttaattgtgtcaatattccctaaatgatttttattagaatttcacctaggtcctacactttccttattaaatatatatgtatgtttgtgtgtgtgtgtatatgtacatgtgcgtatatatatatgtgtgtgtgtgtgtgtgtatgcatatatatagaatgaagtccagataaaacagtgaattttattcccttatatcatttaatattttatatttttctcatcactacaataatattttatattttatatttttctcgtcactacaaataaaaattatttatgtatcaatgttctaatttattctaattatttattctatctattttctacttattttagaagataatctctcattttttatgattaaggtttcctggattgtttagtatgaatataatccctttctttgagatttagatgtactacacaagtgtatgttttctcaatcttaaaatgttttcaattttctagtgtatttatccaaatgcctcttatgttactatcatgcattaatttggaaaacttggtcactgatatgatataccttagcttagtgaaagagcttcattattattcaacaagtagaaaattttagtgtatttacattcttatgtttagttactgctatttctgtgtttagatgggactgttattgacacatattacattacatttcaaataaacattctttatatgtaaaagttatatcatacatgaaatgtaatatttttgcaaaattggacatccttcttcagaaacaaaaattgagttaaaggaaaagttaactttgaaaagctgtttaatactccaatgcaagcaaccaagaactaatcatttttacaattaaatatcttcaatatgtatttttatatgagtcactagggaagtagaagtgcatagcaacaaggagatcaatgggagtaaaaaggagaaaaagaaagggcagagaactttgttagaagtaaaaataaattaggtgtcgaattaaagcacttagatggaaaatgcacgttaaaaaaaaatcgtttgccttgacttattctagaagttaaggaagaagtaggttgtttagagttgtactacctaattatcttaatattcatttaagttcatctcctcactttgatataaggtttttaaaggatgatacaacagatataaggcgcccattccagaaacaagctattatctgcagtaggccccagtgtcttcagagccccataatactattctttgaccccgacaccagagtcaatccacaaaagtcaaattacaccacagatttcagggaaaagttataattatgttctgttatgccaacctggccgtgaaaaataactaaagtattgggaaggaaggcagaggtcaaaagtgagctgttaagagaacaaaattaggcatttactaaaaagctattcactaactctaaattaggagcgggaaccactgcaggcatgcatgtgtgcaacattcaataccttttttttttttttaatcaaatggactctgaaaaatttacccaattatctaaatcttggcattcatagagttttcccattggcctctagcaatgcaattttgttttgacgtgattcagcctggagaaaaatgtgttcccatgacactggtgttgattgcagctgtttgatgattgttacaagtgtatctcaatgttctctcacaaatgtatgtgatactgccagttctgcagctctagtgttcaacatacccggatggtgtttaaatgttcctccatctgacagagtggtgctgatgcaatctgttaaaaattgtgactactctgccaagtatttgacagatttctctgagaaacctccaggatatccatctagcctcaactgacatccaaggctgtcttgttgccagtgccttcatcaagtggcatggatttctgacaggacaatgatccatagcagatttcttctgactagagaagaaacccctcaaatagagataatcacggcattttgttaaattagactaactcaacaacataggaagagaatcaaggcaagagcataatttgaaaagaagctttagtgattctttccatatctgagacctagttattctaaaataaatgacactcaaaattcttaaacagaaaacaagtaaaccacataatgtttttgttttcagaacttactttgatatatgcatttaaaataaaatagatttccattcttatttcacaaaacctgattcagaaaaccccctttattactgtcggtttataaatgcacttctgtatacaattctgtgtgtatatccatgtaagtttcagatgtaagcctttttcaaacagatggttcttgctgttaaagtgtataaattatgaatttgacaaagcagagcatttaaaaacactactataggaaggaatcaaatctttagaaaattaacaaaaatgacatagaaataagccttttttcattaactgatcaatctaactattcagactccagtcactaaacaagaaccatgactgaaaacagagaagtctcttatctttgcttcctggctttatagcaaatcccatgtttttgagttttaattgttcatcaatgatatgtttccaaatttaatctacttcttggcagtagaatcagcaaaacatttgttccctttcttctggatacggctgcaatcaattggatgcacaaatggcataaaggatgctatagggaatatctgccccttcacgaaatgggatagatgtttggatgatggtagtttcaaaagaaacaaaactgaaagtcagagcaaaaaagttaatcaagccaacactcttcaagtatacaactgaaaatacatatttgtcccaattcttaatgatttaagtattcccacatattcataaactctgttaaaggacatgccaaagttaaagtcactggtaatataataaccatttgttaaatgggtaggtgagtaggaacacaaagaatgattatacattgtcatttatccattaaaagcatttacaaaatctgtaagccattaggatgatagctcagtactaatgctgagagaataattttgcttaaaattcagatatgtaggtttatgatagttcggacttactaactatcccaaatactatttttgtatcaaattccttatagtgataaaaaattatgaaaagtgagaatacaaaaaaaaacaataaaattagagatagttcccagaaaagtaattgtttagtacaattatagaaggaactccatagctacagttgaataacagcaacaaccagagatgaggaagtaattgtatatctaggtgtgaggaataaaacaatgaagtttctagataacaaacatatgaggttatcggcatgactttgggataggagagaatttcttaagtgggaatcataaatcattaactataagtagtaagaatgataattggattacagtataattaagaaattctattcaacaaaagacaccattaagagagtaaaaggcaaaccgagagtggaagagatatttgcaatataacaagaggctcattttcaagatatatcaaaacacttacaaataaaaaaagacaacccaacagaaaaacgggtaagaatcatgaacaggcacttttcaagatatgatattgaaatgaccaataaacattggaaaaggtgttcaaccttattggtcatcagggaaatgcaaatttataccacaaattcaagtcataacaaacccacttgctcagcaaaacttataatgactccaaaaagattccaagcattgctgcagaattttcatacactgctagcgagagtataaaaaacattttaaaatctagattggcattatctactacagttgaagatactgtgtattctgtggcccatcaattccactcatgcaccaaatacatgtattaggttggtgcaaacgtaattgcagttattgcaattagactattcttgattttcttgtatttttttgtaagtggttaatgccacttttaatggtgaaagccacagttacttttgtaccaacctaataaaataaagagtagcattgtttgaaatagctaaagatggaaaacaatccaaatgttcactaatagtaaaatggataaataacttgtggagtattcatgcaattgaatactattgagcaatgaaaataaactacagctatttgcaacaacatagatgagtcttataaacataatgtagaacaaaaaaaggagcaagacaaaaaagagcatatacaatatgataactttcatataaatttttttaagacagggtctcaccttgttgcccaggctggagtaccatggcgtggtcacagctcactgcaacctcgacctcccaggctcaagcaatcttctcacctctgcatcccaagtagctgggactacttgggatgcatgccatcccaaggtgcgtgccatcatgcccacctaatttattttatatatttttgtagagacaggggtcttactatgtaacccaggctggttttgaactcttgggctcaaatgatcttcccacctgaggctcccaaaatgctgagattacaggtatgagtttctgtgccctgcccatataaagtttaatatgggcaaatctaaactataaaattctagggagacatatattagtggcaagtctataaagaaaagcaaagaaataactatcagaaaaaccacaataacaattacttcttgcggggagggaaggggttataatcagattggggcacatagggattttctgtgtggctggcaatgttctatttcctgactttggtggtagttgcattgaaattcactttatgattcactcatctaacttcatttatgttttatggaattttaatatgtatatcatatttcacaataaaatgtgtttaaaaggtaaaaggcaattcagtaaaagttggaaaactgtgaagtttataaatatacttctacaagattattttcaattgtgttaatgttacgcaaatggtacttgttttggaaaaattgatagtggcatacatagattcagaaagcgggatctcaaactatttagcagaacagaagaagaaatgctttagaaaaccatgataaatgaccaaaaagtggctgtaacgatgatagactgatatcaaagatatatatgcagaattacaataacgttatttcatgaagtaaaatgcattttaatatcttttatatgaaatgtgattttaacagtcatgcctaaccaaattaataaattaaatgtatgtttaaaaaacctgatcaaagattaagaagccagcaagtggaattctatttttcacccatctctctagtctaatctgttcaaacttcactgaagtaaaagcctgctgctcttgtttcatttttaggccatcattgctcttatttttccttgcctggaaatcaccctttccctccctgacccccaactcctccttctccacctttttcaacttcaactgagacactgcatcctccacttactctacttacttattttagcctttgcttcatatttatatttacacatattttagcctttactttatatttagtgctgatctcacatcaccaagtaggttgttagatttattttatataatttactcataccatacagaagttcttctcaacccagtaacagttctgaaagaagtacctggggagttttatgtttgtttaaaatatagatcccacagaatgacacccagattttcttattcagaaggtctgtactggagctcaagaatcttcatttttgaaacagctcaccattgattctgatatgcagtcaagattgagaatggcaccatggttcctagcatgtgagtagactgaatcattatacaggaagctaaataaatgtttattactcgagtgatgaaacacagagtataatctgtagaagttttattccttaccaaatatagtttcatagaatgaatttatgtttcatcttaaagatgagcaaactaactcatggaaaggttaagtattttgtccaatgtcataaaaatagtgaactagtgtcaattatagagctataaaagattttcttaatcctgctcaaaggctctttctaccacactagatttttcaatgccaatggtggaattccaatgaaatacagtactacacaaaataattaattcaaaaatatactctaaaagttccatcacttatcaggcacatcaaatgttgctgcatttggttagaatggtctgtaaattaccatacctctgccatctattaaacatttttgctatgatctagtgagatttgcccttggaaaaaaatacttttttttttctagtcaagtgaagcagtgggagtggagaagccttggaaaatttaatgattaaaactgatgatagaatcctcctaaacttgttataaagaattagatacataatatattttgcaatgataccaaatgttccaatatttaatacagatttgataaaatttttaaaatattttttaaaaaacggtattttatactataagcctttccttcttgctgattactttttgaatagggaatttttatgtctctattcattatttctaattgctctgatatttttgcaatcatgttctatttcctatccaaaatattcattagtattaactagcacttctgatataaccattcttcaactgaagatgatgccacaacaatttagattatgatctaaagtaaattatcattttataaatggaatattcacctgtccttctttacctactctcctttaatttgcttattcctcacttctaattcattcctctcaatatcatcacctttaataaacacacccctcacctactttatgatgaccaacaaggtgatctcgtctttataatgccaagagagtgatgctagaatattatgagcataggccataatttcaaatattctgtgattactaacaaattaattggccgagtaaaaccaattaaaaataaatgcttaacttatatagacaaacacactcaaccatattttcattgcatacagaaattaaataagattttgatttaaaaacatttaatttgttagaaacccatgtgctaggaaattttaaaacacacatcatattatatttaagaagtcaggactggaatatttaaataaaagatttcctccagacttaactaggctctcaattcattaagcagcacatgttttacgaattgtaaaatcaagcaaattgattttatgttaagaataagcaataataggtagttgattaatatatgcaaagaagtaatcaaccagtatatacaaggtattatgctaagtactatgagggatacatagccacttgcctccaagtggctaaataattacgggaaaaaatgtataatgggatggatgctgctaagagatttttattattatgcagcctcctttatatctagagcactggttctcaaccagggccagttttaatactccggggacctttggcaatatttacagacacttttagatgtcacaactggagaatgggtgggcattgctatacaatggctatacaatagaatgttgttaaacattctataatgcacagagcagcctcaccaccaacaaacagttaacaagcacaaaatgtcaatagcgttaaagttgaaaaacccagatctagaggcggagacagaaaattactttgggatcaaattcttgttattaagggaaaactcagttgagctacctcctttagtcatataaatataaggccagtaggtacatcagtaggctgagtatgtcatgttgctacatctggaattgcctttggacctagtcaccaccatagaatgacatgctttgagaacaatgaggaaacacataggggaggctaaaagagatgttagcactagcaaacatgtgactgagcaagcgcatcactgcagtagtgtatattcaattggttggcaggaccaacgggttatgcagactgacaatatgtagacagtactaaaacagcaagactagtaaattttctagttctttatatctacagttaagtatcgcttaatgacagggatacattctgagagatgcatccctaggtgatgcagggacatcataaaaatgcattgctgggaaattttgtcattgtgcaaacgtcatagaaagtacttttacaaatctagatagtatagactactacacatctaggttatattgtatagcctgttgcccctgggctataaacctgtacagaatgtcacctactgaatactgtagccaactgtaacataatggtaagtatttatatgtctaaacatatctaaacatagaaaagaaaaagtaaaaatgcagtattaaaatcttatgggaccactgttgtatatgtggtctgttattgaccaaaacgtcattatgcagtgcaagactgtatttggctttcggaagcaggagtgctttgattagtcgatagtcttcatggatgaatcactggagaaagaggcttcttgaaggagataataaactttgtataaagacaggtgagcaattaagtataagaaagaaatgtatgggccaggcacggtggctcacgcctgtaatcccagcactttgggaagccgaggcaggcggatcatgaggtcaggagtttgaggccaccctggccaacatagtgaaaccctatctctactaaaaatacaaacaaattagccgtgcgtggtggtgggcgcctgtaatcccagctacttgggaggctgaggcagggagaatcgcttgaacctaggaggcggaggttgcagtgagccaagatcacgccactgcactccagcccgggcaacagtacgacactctgtctcaaaaaaaaaaaaaaatagaaataaagaagtgtatgaagcatactgtattggtgcaccaagctggcaaagcaagttatatgttgttgcaaatgttgttgttgattcattaagagacttggccattatacctattccccaccattctgtgagtgttggctgctaatagctcatagctacctctgttcttgagataattgcccttggctgacagaaactgtgccacctgggatgttatgcagtctgtctcactaggttattggcatagggtgcataacctcccaggggtacaaaaggtctgggacccttgtctcagagagagacaattctatgccgagatttatgctccagaacttttgaatcccaccctactccacccctcaagaccctctcctgaggatcaagtgaaagctagactttacctgagaccacatccttgctcgtttttttccccttccctatcctgcttccctttctttcttcaggtgtttcattaagagcttttgctcaataaattattttcatgccaaattcctgtttgagactctgcttttaggaaagctgatttacaacacacatgaaatcaagaaactaaaatagaatgtagaatatgacagtctgtagagaaagattcatgttctgatcaactcccacttatgagtgagacatggacacggggaggggaacatcacacaccggcgcctgtcagggggtggggggctaagggaggaatagcattaggagaaatacctaatgtagacaacgggttgatgggtgaagcaaaccaccatggaacgtatatacctatgtaacaaacctgcacgttctgtacatgtaccccagaacttaaagtataataataatgaaaaagtttttgcaggaaaggagaccaaccagccttgttgaggagctattgccagaacttactgtaaaatgcaaggacatccaagtggtacaaagggcgaatgaaagtggatgctctggagcaccagcctgatcccctttaagaactgaagcactaatttccccacctgctggaagtgctggtagctgatggccctcagctgaagaatgttgactcacacaagcttgtagcctctgcctgatggaaaccagcagccaacaggtggtcgaattgagggtataaaagccagcacctgccccctaatgcttgcctcaaagaaaggcaaccatggagggttatctcaattgcaggtttccctgagctatggactgaagcatccattgcaactccttcaccattctatttcttcctctgtgtaatcatgtttttttttcaatcctcacaagtgttattactgacagcaatttccaataaagtttctgcctacaaaaaaaatgattcatgttctgtcatccttatggagaccgggcttggggcccatgcaagacagacagttaaacatgagatactagcacaaagctgggaccctttaaaggccgcttcctcagagaataggtagactagacaaaccctacccaccaacagaaggagacaatgggaagcctgccctttgggtaacaaaaaagaatttctactagcaaatccaaacccctaggattctaccacacatgaatttagaatccaaattcatgttacctgcatggcccagggacttatcatctgagaaatcaacataacctttgtctggggtaatacacggcaggtaatgatacatggcagatgcaaatgcataaagctctctggggaatttttctcaaggtattcctacagaagaaaatgagtccaaataacaatgtgttcatatgataaagaataagagaaggagaagaaggaaattgcttgaccagctatccagtcttataaagctatacaagggacagaaaaatactatagaacaaaatggtatcatataaagcgacctgagaagtctggctcttgaccaaaaatccgatgtgtgattttttttttttttttttggcccaactatcggcaattagaggctttacctgacaggccttatgaggaaaaactgccctccctacaccagacttagagcacagccaatgcattgcagtctctgaaggaagctgcagtaaaggacccaactcagcctcccctatacccccttttcaggagcctctgccaaaacctctttattggggggaagggaggatttttttccactctcacttaattttcaatactttgccactcctagcccttttctcttgccctcccctcagttcttggtttcagaaagcaggagccttttgtttatggctcacttaacagtgagaggagccccatgtctgtgccgatccatctgaacctcgactagcactagcacactatcacaaggggaaaaatagaacagggtgctttctcgggtttaacctcttgcttatctagtcttgactgttaacttttgttttggcttaaggttttaatcagctactccaagacttaacaactcagctttctccaactcagctgaggtcctgacaagacctagataagtgtataacacctatcttggtatataactaaagttacattataactcagtgaggaaaggatgaattagtcattaaactatgctgtgacaattggttctccataggagaaatgagacaaagttagatccctacttcaagtgatgggctgggaaacgtttaacaaccagcttcctgggacaggattggaaaccttatttgtagcacttgccaatttctgtggtgtaaagactttcaccatgggtaatcaagctacctatgtgatgtcatggaatgcagagttgggaacagatgcatttaattatctctagcaagctgattctagtacaacactactgccctccacaatacacaaacataagctgcagatagagtgtatatttaaacatgaaaagaaaattttaaaacttatagaaataaacagataagtctatatcataagtggataaggaagaaattcatagtaagacaaaaataagtacaaacttctttcacactattaggacacattgataataataaaaatgtacttatgttttccgacttgaagtgttctatattattttagatcaccaagggaaacatagtatttatataatacgaatgaatgaagacagatttgtttgaatgcacagctttagcttcacacgtataacagataggtatgctgttgtttagaagatgatcttcaaaagtcaaaaagtttacagtgagaaacacctcactgtaaaagccttattcttgctgcattttattcaagctcatttctcactacattcacaagaactggaattcatgcccatcctgcagtcagtaaatgtctctcttaaatttcaatcaatggcagaagggtgtagaataagaaaaaaaaaatcagtttctgtaactaataagatgataatttttagtgtagagttataatattgtaaaaattatttcaataattagtatattttatacattaaaagtattattcattaaattcattttattatcacattaagtgactttaatacctaaatgatgaaatgcattaataatcagttatgaacataatcataataaataacactaacaactaaagtaaccaataaacattataagtcctatgaacaaaatagttgggttccaaacttccccaaaaagttcctccttttgctttacttactataagcaattgtacattatttaagtatatgattattagcacatataaagtatttcatggtaagccatctagtagtgtcaaaagtaagtgaaagaatggagaaaagtgttgagtttgctgtaaaaggaaataaaaaattataaataaggccacattttagatgcactgtcatttttagttctatttgattctatcctcacagttacatagagcagagccataattgagagaaaccactttatccttctcttcattcttgattgaagaagaaaatcattgaaacataaccaatatcctttgcaagttcacgagctaggacatttttctgccttccttttgcagactcatattaaatggatataaagggtcctgggtcagtctagagtttaccaccatggttcacaaacatgtctgtgcataaatatcttaggtacttatttaaaatatagactcctgggcctcacacaagttatactgatgtagtatatagtatctagagattggtatgttcagtacttgccgtcctccaaaattattctgatttagcccatctatagatagactagcatttcaaaattactcctagaatttcctgggaaatatttatgtgttttaggtaggggattaagggctggacatgtttatgtattcatctcaaaaagtgggagcaaaagaatatatggtagatatgtggttttcatgtataaactcaaaagtatctttgttgtaattgggcttatgggccaaagaacaaaattgaagattagtattcttatgggtttacaatattccatataccgttgtccaagtgaatgtcatgggcattccagccattcaaccatctaattatccactaggtattatctattttaccttataaataacctgttatgtctgtccatttttctttttgtttattgatacataatgttgtacctactttgaggatacatgtggtattttgatacatgcatagagtgtgtaatgatcaaaccagggtaatgaggacatccatcacactaaacattcacttctttatgttgggaatattttaattcctctcctctagcaattttgaactgtacaacaaattattgttaactacagtcattctattatattatcaaacactagatcttattccttccgtatatcagtatctctgtacactttaaccaatctctttaattcctttcatccactcaatccttcccagcctctggtgatcaccaatcaaatgtctacctccatgagatccacttttttagctcccacgtatgctttgagaacatgaggtatttgtctttcagagcctggcttatttcacataatacaacgacctaggttggaaagttttctgttattacatctttgaacaagctttctactcttcctcaactccctcttgaacactttttaatttgctcttttgtagttattccctatattgtgttggcattatttgtactttttcattctttttcttttttctcctctgactgtgtattttcaaatacaaagtctgtcttcaggcttactgattctttcttctgcttaattcactctactgttgaaaaccaccaatgtattcttcagttcagtatatgtatttcgcagctccaggatttccatttgatattttaaattattatttcaatctctttgttaaattcttctgataaatttgtgaattattcttctatgttgccttggagttcagagtttccttaggactgctatttcaaattcttgatctaagagttcatatatcaccatctcattaggtcatggtttcctgtttgctgtcatttccttttgatgtgtctattattttgcattaaaggattagttatttatgcgagtcttcattttctggcttgttttgatcttcctaggctgtgtttgtttgagatgttctttgcagttgcctattgaggtcccttaattcttgatcactgcctcctttttgtgctgtctgtgcaattgatcctgattgtcagtgagaaattcagttgcttctcctcaaaatagagaaaatgtctggaaaccagaggattttatagagtgcccattagtacttctatattcagtggctaaaattagttgaaaataactaaaagccaatgccagcaccaccactaagagctgagattcttcagaaacgaagccatgtcttaccataccagcaaataaccatggtcagcagaagatatccttcaaggcaaatgaatatgaaatgaagagtaaagaaagttctaaattccaactatgagttgcagaaatgaggactgcagtagacatattctcatccttgctttctttgtatatatttgtataatgaacaaatatcttttttaaaatgttgcctccctccttcccttattatatgaagacatattagtggtcactaatcttatagtctttaggctacaggatacctaaagtagcatatggctacactagaagaaaaattaatatcctccagagatagacacagtgacagataggactttgggtctccctttatttgcattaaagacagttgcaaaaggttaggtataatacatgtttgctattgttgcggaagtgtgtatatggattctatttgctgacgaagaggacttaatgaatgttttatgatgacttttggcaactgttatattaccttctatgttctcccctccactgtaagagctggaaacattggaactacattttccagattaccaagcctctatctttttacatatgcattttatattttaaaaatgagatgttttcacatataatttggacaaagagtggcaaaatccatcttcttcctctgatagtagtggtagacagaggtctgggcatcccagatatgagagttttttaaagtcatttctgtattctcctgctgtttactcttcttgggattaaagaagagctatgaagtctttcagaagattctttttatttcctaattccgtgtggtagcaactctaattctttgtgacagtgagcttgaaagctggtaacgtgacctgagacactcagtcctccacctttccaacaattttgtatatattaattatgtcaaaattttttgactacataatggcctgataaaaaacttggtcccaggaaaatcttttgtatccactacagttttccaatagttatataatgacaagacatagtctctgagtgtctcctttccttccactagacttgaatcaatactatgattttgtacattgtcttcttgggtcccaagttctttatcttcctctgttaagaaaactcatcaacctttcgggttaattcagggatagtaaacaggtagtattggcatttttaaaaagttaaaaataattcagaaacactgcactgagcataatactatttagttctaattttaaatgttttcaagttatcaggtaggaggtgaaaagttattgtggcatattatttattttgtctaacatcacatttctatttaatcatctaattttgtaattaaggttctctgtgatatagttatgcaattaatgatagttacagtatttaaaatattcgagtaaacctaactgtataactttacgtggaatctttagacctttattatactgatgcttacacttttatttaattgatcgttgccctatccagagtcctcttacttcaggtgtgagtactattgtgccttgtcaacagcatatacataatgcacagctatgaccttttcccttattttctttttcacataatttctatttcaggataaatattaatcatatcaggcaataagtttttaaagatgactatcctactctcaggaggattaaggcactgaatctttggcttttttccattatacaacctatctgggtctcaaagaactaaagtgacggtttatgattgttataccgactgtcccccagttggtcattttccacaaccatcctaatcaaacaaataataggccttatttttaattaaatgtacaaagttaaataaggaattcaaataatagcagctattatttactagcttctatttcaaataaaattctgtgttaagtgttttgtatacctttatgtttttcacaaaaggcctttgaagaagacataattatttataatttatatactaataaattcaggtaaaattatgttaaattactgtttaagtaattgggattagaatccagatccatcttaagtcaaatcactgccctttacaaaatatgatactatactgctttaaaaagtcaatttatagtattataagccatgctgatgaaatgaagacctaatataatcagtttcacaactgatttaaatgagactataaataacaattgtataactttacatgattttaaatactacattattagagtcaatattgtctagttttcagtatctaaatccatgaaaatatatagtgagagtcgcttacttatgtccgcttttcacacgtgaaatgaccacttgcatcagatatgaagtgattcttaataacgtttgaaaacattcttactaacatttgaaaatatttgctcaagacgcatatattcagctgcttatgtgccacttctacgttccttatctgttataaaacttataactatttgttactgttcaatctcacaaaatacagaactcaaaggatggaaagcaaaatccaggaaatggatacagctgtagatgtgctaacatagcaggtagagggctccagaaagagcaaatattttctattggggaggagagattctcactttaagacatggttgctcagagtgaggatcactgaggaaaaaagaaaaataaataaataataaaaataaataaaacatggttgcatgattcagaagcatttctagttttttgttcctctttttcctctaatttatccctccagtcacttgtggtaatagtgatgttgctttaatgatgtgtaaatggccccagagagcttccttatgaaatgacaatgaagtttttcttaaatctagacttcctttggcttcaggttttcccatatccaataatcagaataatcatcatttaccaacttcatgaggtacacaccttctgaatcagtcaggacttttactgttgtaagcaacagaaaacaattcaaattctttaaacaaacaaaaaataaattattggttcatgtaaaggaaagtctaaaggtaggatgagcctcagctgtgatttggtcagtgatgctctcagctctggcccttttggtgcgctgcctttgtcctcaggctggcttactttggtggtgagataactactgcaatttcaggcttcacaatgcatagcatgctttccagaacaacaacaacaaaaatactcttctgtcacagcattttaccctgattgagccaccttaggttacatgccctgaacaaagcattctagacagagggtagaaaaattgtgattgacttaaactgaagatgggatctgctttgctgaaagcagaaaaacttcatgaggaatgagtttgggtccagaaatctgtattctgagtcctgttttactgattcaaactgggtgtctttgtatttcctagtaatgcattcaaccatactcgagctgtctggtatgaaagtcaacctcatataggattctagttttatatatgtttaccttcttgattacattcctatccaggttgatttttcattgaaaatttccctcaaactatagaatgccatcatttgaggcaccaaacatccaatgacttcaatcaaaatcatcatagtcaaaactacaacaagatgacactctttctttttttactttcattcttgcttggcatctaacttctgttgtaatgacctttctcaaaaaccaaacatcctccaacacccaacagaaaaatcagtcatttttttttgtttttaggaataattgttttctggatcctttctgcaataacaatgaagaaaaaaggttttgattgcaaggtaatcacatatgttatggttgctttaaaaaggacatgaaagatagcttttgtgagagtccttcataaagatattgccttttctatttattttaaaataatactggttgtttataattgaattttagcatgatcagaatggtgtaaataaggtaatatgtatctctacccttctttttaactgcaatgttgtaatccatttaaaaattgggctacttcattttacagtatttaaaaagtgattgtagtataggcagaagatcatctaatataaattcaacactccagtttagggatatagaatgactaatttgtgtcatataaggggccttaaagaataactagtcatgatgaaaataaacaagaaggataagtaaataagagcattattatgcagacatttatgaaccattaagcataatcatagctaaggaaatagctttctgtttgctagagataaccactctgaactaggatacataatactttcaatgactaatacaagaatatttatattacaagcagagtgaaatgcaatatctatgtacaatatgatatgagaagcaaataataacaatgtcttttactaatggacttctgattaatcaaaaaagatgattgaataataatctttaaagatatattctaaggatacacatttcaaaagtatattttataaaatgtgttttttcattgaaaaatctcaacgtttacagactgtcaccatttcatgcaccaaatacccaatgacttcaatcagaatcatcatagtcaaaactgtagtaggatgactctcattcttttttttcttgacattaaatttaatgactatcaactcaaaggcaataaataatcatactgtatgtagctacaaaatatagacaatatgtaaagatatactaattttgaaattattttgcatatttattatgtctatataaaatgtgcaaatatgtttaaaatgcaacactaaatataaccatgaatggatttatttttgagaacaacaatgatcttagtagcactatcctttaagagaataacatgctaaaagaactatatccagatttaaaaatataacaatcataataactttacattactttgttttttaaaaagtaatgagctatttctagacagtaaagagtttttcatagtatttattaattaaaatttttcccaccaaaggcatcctgaataattttatttaatgggaatttaaccaagtaaatgatgacaaaatataactcattcagaaatggaattattatttaagttcacaagaagtacataatgatcatttccactcttatctcctagtcatccaaacaaatgagagtccatttaaaggtggtcaccttgttaatctggtgtcagagaaaattttttcctgaaaaaaattctgctttgggcagaatgctgtacattgacacaaataaaacattttaattgatgaaactgactatgttttaacactacagttttacttggtaaatatgtaacctctcaagagaaatagtctgaggtttttaaggatacttttagtttactgcatctttcaaaatatttgtactaaaacctaaacattaacctgacacgtcagaatacttacaagaacttgtgatatgagacaatgacggaaaatagatgtcttaaataaagaggaacttttaaacttaatcattagttcaacggtatttctggagtacttgatagatgccaagctgtattaatgatacagaactatcatcatcgtcatcatgatcatcatcatagctaacatttatcgtgtctttatatatacaagtactctgctgtaggttttgttgttgttattatgtctggttttttcttatttcatttaatcttttattttctcccctatctgtataaaagataatacttagattattaataggttttactattattatagaaaattcagaaataacttgttcacagctatatagtaattgctgaagcctttatttaaatccaggaaatgttattccaaagcatgatatttgaactactaaactacagttgcttattaccaagaatcctacaatctatatgggagacagtacatacacacacccgcttgcttgaatttaaggttttttttttctatcctataatactcctactcaagcagttgctgatacctagaatatatatctcaaagctgtctacttctctgtgtctccaccaccatcatcctgaccaaacgatctctatctgatctactgacatagacttataactagtgtccttgtttctacctgtgtctttttagcccaaaagtcagcatcttatttaatgagaaaacactagagtcattccaactaaaatacaaaataatgcaaagatgttgatatggtttggctgtgtccccatccaaatctcatcttgaattgtagttcccatgatccccatgtgtcatgggagggccctggtagcaagtaattgaatcatggagatgccaacccgcatgctgcacttctcatgatagtgagtgagctctcagaagatctgatggttttatgagggacttttccccctttttgctctgtacttctctctcctgctgccatatgaaggacatgttttcttccccttctgccaagattgtaagtttcctgaggcctccccagccatgcagaactgtgagccaattaaaactcttttctatataaattacccagtctcgggtatgtatttattagtagggtgagaagagactaatacaaatgctcactatctcctctattcttcagtattggacagagatatcactcaatgcaattagaaaagataaattaattaaaggtagtgagaactacaagaataaaaactatgatatgatagtatatctgaaaaaaaattagagattcaaaactaaaagtaacaaaataattcagtaaggtagcaagatgtaaaatcattatacagaagtcaataggctttacaaataaaaacaataatagctagaaaatgtaatggtataaaaatccccatttacaggaaaaacaaaaatatgaaacacctaagaataggattaatagaaaatgtggaaagcctatatgaggaaatttttaaaatactcttgaaagatataatgaaatacctcaaacaaagagataaagattcctttttcttggataggttgactctatatgataaaacgtcagttctctctataagttcctttatatatttagaacaatcccaatacaaatatcagcaatttttttcgtggatccaaacatgttgatactaaagtttatatggaaaaacaaaatcaaaatatcaacagtaaacactgaaaatagaaacttacaaggtaagatcagcctaccatacattaagtcatatcatagatttctattattaaacccgtacagtattcatgcatgaatagaccaacaatccagtgcaatagaatagggtgtccagaaatagaccaaagtacacatggaaatttagtatataataatgtaggcatctcaaatcactgggataaagatagacttttttttaatggtgtgggaacaaccagtcagccattttagaagaagacaaaaagtctatttccgaataacaaattccgaatggatcaggggtttaaatataaaaaataaaactatacaggtactagaataaaatctgaatatagggaaaaaatgtccacctatgactcaaatccagactgaataaaagaaaagatcaataaatttgttaatacaaaaattttaaagccatcaaaaagctccaggcccagaatcaaaggataactcacaaactaggagaaaattttcaacatatatcacaattaaagggctaatagctctacctttataacaactcctaaaagttgaagaaaaaatccaaaaatccaattgaaaatgggcaaaagtcatgaatagacaagtcactatatctatatctataactatctctctctctctctctctatatatatatatacatatatacatacatcccttaaacatatgaacagaagttcaaccttattcatcattacagaaatgcaaattataagtacattgttatattatacttcacctacgtgactggcaaaaattataaattacaacaatacattttaccggtgaactgtaggaaaaccatcattctcatatattgtgggtgggaatgcaaactcatccaacatctatggaagggaactcagtaatgtctaatgagcgctacatatgcatttatcttctgatccagcaacccaacatctagaactttaccctgaagatataattccggaaacaggaaaatgcatatgcataaggttcttccttgcagtgttgtatgcaactgtaaaatattggaaacaatctaaatggctatacctagaaaactatggcagagccacataatagaatattatgtaaagtgcaaaggtatgctagtttttgcttaaggaaaagggggaaataaaacaatgtatatctactcagttacaccaaaggaaacataagaaggacaaatcggaaacaaatgagatttgttacctctagatagtgcatgagaatgaagtggaaagggtgggagagtgagaatgggatagaagataacacttctctcccatgtagttttgcttacagctctgaaatcatatcaacatttcacatatttagaaagtaaaaccaatcaggatggggaaaataaaaacaaaaggaaatataaacaaacagaataaaagagaacttactggtatttcaaataaataacatcctcagactgaaggggagcaaaaaaaaaaataacccaattaacctattaacatagtattttggctatacacctctgggctgtagacacacacacacacacacacacacacacacacacacacacacacacacactggacactaagttaaaagggttgttgtttttcccagtgctatgggttaacaattctcaaactgtgtgtgtgtgtgtgtgtgtgtgtgtgtgtatcttgtgtgtgtatcttgtaggattgagcaacaagtggaatgtattgcagagaaatggagatagatttgttacttttggagaagtgagttacaaatctggaaagagtggaggttagaatgagttttgtggttttatatcagaattggagacaacagtatgaactcatggtttttcagatagataggtaggcacatatgcatatatgtgtgtgcgcgcacacacacacacacacacacacactttctaggtctatcaggaggacctaaagcaatggcaccccagaagcaatgagtacctagtgtccaaatgttggtctctaaatattagtttccaagacttcttaatgcaggacgatttgagcattaaataaataatgacaacaaggattaataacccatagattaaaataagaatacttatatacaaaaatgaataaatggatgagtagggaaagctgttattgaaatagtaaatgacaattagtaagtgcaaaaggaattatagatttataaaattactaatagcatttgtctccacctttggaagtaataattcagacaagaatcatcaatggattataaatctagtgggtgcatgtttaatgaaaaccagcatattaaatcatcttaaagtatctctccaaaatattgattacaaaaactatagcaacttcagaattgggaaacttgcctgataccgtcatatccaagttaccaaggttaacatcatttctaatggtgccatctgataggatgcattgaaacacataataacacttctctggtatccccgccaaagatgcataaaccgaatataatcatgaggaaacaacaaacacacccaaactgagagacaaaatgactggctaacattctttttttttttttttttttgaggtatgttttattttattttatttttttttgcattgtgggtttatttatttatttatttacttatttatttatttattttattgatcattcttgggtgtttctcacagagggggatttggcagggtcataggacaatagtagagggaaggtcagcagataaacaagtgaacaaaggtctctggttttcctaggcggaggaccctgcggccttccgcagtgtttgtgtccctgggtacttgagattagggagtggtgatgattcttaacgagcatgctgccttcaagcttctgtttaacaaagcacctcttacaccgcccttaatccatttaaccctgagtggacacagcacatgtttcagagagcacagggttgggggtaaggtcacagatcaacaggatcccaaggccgaagaatttttcttagtacagaacaaaatgaaaagtttcccatgtctacttctttctagacagacacggcaaccatccgatttctcaatcttttccccacattcccccctttctattccacaaaaccgccattgtcatcatggcccgttctcaatgagctgttgggtacacctcccagacggggtggcggccgggcagaggggctcctcacttcctagtaggggcggccgggcagaggcgcccctcacctcccggacggggcggctggccgggcggggggctgacccccccacctccctcccagacggggtggctggccgggcgtggggctgaccccccaacctctctcccggatggggcggctggccgggcagaggggctcctcacttcccagtaggggcggctgggcagagatgcccctcacctcccggacgggacggctggctgggcagggggctgacccccccacctccctcccggacggggtggctggccgggcggggggctgacccccccacctccctcccggactgggtggctgccgggcggagacgctcctcacttcccagacggggtggttgctgggcggaggggctcctcacttctcagacggggtggctgccaggcagaggggctcctcacttctcagatggggaggttgccaggcagagggtctcctcacttctcagacggggtggccaaaaatatcaagatgatggaaaacctgggacaaaatgtcttcaccatgactgaagaacactttttgagtaaagagaactagagagacaattaaatgcaatgtgtgatgctggattggtgtttttttttttctgctgctgtaaatatcattggcgaaattttaataaggtgtaaagattagacaccagcattgtatcagcatttatttcctgattttggcaattctactgtggttatttaagtgaatgtctttctttttaagaaataaacactgtagtatttaggagtcagaggggatcctgtccatttatcatcaaacaaattttaaaaagacagtacgtatctacagagagaatgatcaagtaaaatttggtattatgttaacattcaaaaaatttgggtgaatgactattcagacatctttggtactattctcacaacttttctgtgaatataaaatatttaaaagttgaaagttaaaaagaaaaatatattgtatttaaaatggagtaatagataaaaatggcaaaatgttgatatttgatgacagctgatagcttcatgtgtatcattagattgttcccttttgtgtatatttgaagttttcaataataaaatattataaaagcctataattaattggattcagaagtctcaactaactaaagtatggaaaaacatgtagaacttttttttccagaaacggatacctacttttctctgcagcatctactgccttttgggtactgggggataatttattctaatttcataacttctcagacatttttattattaaacgactctaatttcaggttaatgtttaataactttaggtattatcatctatcatcattacttcaacttcctcttccttcctcaggtctctctacaactgcattagtcatccgatcagggatgttgaaagcatgtaacctgtttttcctcatctctctcttcctcctcattcctcccctattctttgtccaccttgcaagcaatggctgtggagaaggtatataattgcttaggagattatctgtatccagtgatcacataagctatttcaaaatacaattaagacttgtgggaatttgttgtcaatttttaattttttgggtacatagtaggtgtatgtatttacggagtgcatgagaaattttgatatgggcctgcaatttgaaacaatcatgtcatggagaatggggtatctgtctcctcaagcacttatcacacattgagttacaaacaatccaattaaattcttttagttatttttaaatgtataattaagttgtttttgactatagtcaccctgttgtgctatcaaatagtaggtgttactcaattcttctggcttttatttgtacccattaaccatctccacctgtcccccagtcctctaataagcttcccagcctctggtaatcatctttctactctatctccatgagttcaattgttttgatttttagatcccacagataagtgagaacaaggaatgtttgtcttgctgtggctggcttatttcacttaacataatgacctccatttccatccatgttattgcaagggaatgggtctcattctccattgtgtatatgtaccacattttccttatccataaaaaacagaaatacagatatctctttgatatactgatttcctttctttggggtatatacctagtggtaggattactggatcatatggtagctcaattttttgcttttttgagaacccccaaactgttctccatagtgattgtactaatttacactcccacctacagtgtatgagcattcctctttctccacatcctcaccagcatttgttattgcctgtcttttggatataagtaattttaattggggtgagatgatatctcattgtcgttttgatttgcatttctctgatgataaatgatgttgagcacattttcatatgcttgtcacttgtatgtcttcttttgagaaatatctattcaaatcttttgcccatttttcgataagattagattttttgcaatagaattgtttgagctccttatatattctggtaataaatcccttgtcagatgggtagggtgcaaacattttctcccattctgaggggttgccttttcacttggttgatgtttcctttgctgtgcagaagcattttaacttgctgtcatcccattagtgcatttttgctttggtttcctgtgtcggtagggtactgctcaagaaatctttacccagaccaatgtcctggaaaatttccccaaagttttattgtagcagtttcatagtttgaggtctgagatttaagtctttaaccagtttgatttaatttttgtatatgccaagagataggggtctagtttcattcttctgcatatggatatccagttttccctgcaccatttattgaagagattgtcttttccccagtgtatgttctcggcacttttgtcaaaagtgagtttactatgagtgtgtgaatttgtttttgggttctctattctgttccattggtgtatgtgtctgcttttacaccagtaccatgctattttgcttactatggctctgcactataatttgaagtcaggtgatgtgattcctccagttttgcccttttggcttaggatagctttgtctcttctaggcattctgtggctccgtataaattttaggactgttttttctatttctgtgaagaacggcattggtatcttgatagggattgtattgaatctgcagattgctttggatagtatggacattttgacaatatttattcttccaatccatgaacatgaaatgtttttccattatttggtgtcctcttcaatttctttcaacagtgttttatagttttcattatagagatttttcacttctttggttaagttaatttctaggtatttaattttatgtgtggctattgtaaatcataatttttatttctttttcacattgcacaccattggcatatacaaatgctactgattttgcgtgtttgttttgtatcctacaactttaatgaattttttagttctaacagtttttttgtagagtctttaggttttttttcaaacataagattatatatatcatctgaaaacaaagataatttgacttcttccattccaatctgaacacagtttatttctttctcttgtctgattgttttagctgggacttgcagtactatgttgaataacagtgatgacagcgggcatccttgtcatgttccagatcttagagggaaggatttccagggatatttcttccatttagtataatattagctgtaggtctctcatctacagcttttattattttcaagtatggtcgttctatacccagttttttaagggtttttatcagaatgggatactgaattttatttatttatttttctttttattattattattatactttaaattttagggtacatgtgcacaatgtgcaggttagttacatatgtatacatgtgccatgctggtgtgctgcacccattaactcgtcatttagcattaggtatatctcctaatgctatccctccccccctccccccgcccccaccccacaacagtccccagagtgtgatgttcctcttcctgtgtccatgtgttctcattgttcaattcccatctatgagtgagaatgtgtggtgtttggtattttgtccttgagatagtttactgagaatgatgatttccaatttcatccatgtccctacaaaggacatgaactcatcattttttatggctgcatagtattccatggtgtatatgtgccacattttcttaatccagtctgtcattgttggacatttgggttggttccaagtctttgctattgtgaatagtgccacaataaacatacgtgtgcatgtgtctttatagcagcatgatttatagtcctttgggtatatacccagtaatgggatggctgggtcaaatggtatttctagttctagatccctgaggaatcgccacactgacttccacaagggttgaactagtttaccgtcccaccaacagtgtaaaagtgttcctatttctccacatcctctccagcacctgttgtttcctgactttttaatgattgcaattctaactggtgtgagatggtatctcattgtggttttgatttgcatttctctgatggccagtgatgatgagcattttttcatgtgtcttttgcctgcataaatgtcttcttttcagaagtgtctgttcatgtcatttgcccactttttgatcgggttgtttgtttttttttgtaaatttgtttgagttcattgtagattctggatattagccctttgtcagatgagtaggttgcaaaaattttctcccattttgtaggttgcctgttcattctgatggtagtttcttttgctgtgcagaagctctttagtttaattagatcccatttgtcaattttggcttttgttgcccttgcttttggtgttttagacatgaagtccttgcccatgcctatgtcctgaatgatattgcctaggttttcttctagggtttttatggttttaggtcgaacgtttaagtctttaatccatcttgaattaatttttgtataaggtgtaaggaagggatccagtttcagctttctacctatggctagccagttttcccagcaccatttattaaatagggaatcctttccccatttcttgtttttctcaggtttgtcaaagatcagatggttgtagatattcggtgttatttctgagggctctgttctgttccattgatctatatctctgttttggtaccagtaccatgctgttttggttactgtagccttgtagtatagtttgaagtcaggtagcgtgatgcctccggctttgttcttttggcttagtattgacttggtgatgcaggctcttttttggttccatatgaactttaaagtagttttttccaattctgtgaagaaagccattggtagcttgatggggatggcattgaatctataaattaccttgggcagtatggccattttcacgatattgattcttcctacccatgagcatggaaggttcttccatttgtttgtattctcttttatttcattgagcagtggtttgtagttctccttgaagaggtccttcacgtcccttgtaagttggattcctaggtattttactctctttgaagcaattgtgaatgggagttcactcatgatttggctctctgtttgtctgttattggtgtataagaatgcttctgatttttatacattgattttgtatcctgagactttgctgaagttgcctgtcagcttaaggagattttgtgctgagacaatggggttttctagatatacaatcatgtcgtctacaaacagggacaatttgacttcctcttttcctaattgaataccctttatttccttctgcctaattgccctgggcagaacttccaagactatgttgaataggagtggtgagagagggcatccctgtcttgtgccagttttcaaagggaatgcttccagtttttgcccattcagtatgatattggctgtgggtttgtcatagatagctcttattattttgagatacagcccatcaatacctaatttattgagagttttcagcatgaagggttgttgaattttgtcaaaggccttttctgcatctattgagataatcatgtggttttttgtctttggttctgtttatatgctggattacatttattgatttgcatatattgaaccagccttgcatcccaaggatgaagcccacttgatcatggtggataagctttttgatgtgctgctggattcggtttgccagtattttattgaggatttttgcatcaatgttcatcaaggatattggtctaaaattctcttttttggttgtgtctctgccaggctttggtatcacgatgatgctggcctcataaaatgagttagggaggattccctctttttctattgattggaatagtttcagaaggaatggtaccagcttctccttgtacctctggtagaattctgctgtgaatccatctggtcctggactctttttggttggtaagctattgattattgccacaatttcagagcctgttattggtctattcagagattcaacttcttcctggtttagtcttgggagagtgtatgtgttgaggaatttatccatttcttctagattttctagtttatttgcatagaggtgtttgtagtattctctgatggtagtttgtatttctgtggaatcggtggtgatatcccctttatcattttttattgcatctatttgattcttctctctttttttctttattagtcttactagtggtctatcaattttgttgatcctttcaaaaaaccagctcctggattcattaattttttgaagggtttttttgtctctatttccttcagttctgctctgattttagttatttcttttttttttttttttctttattttttttttcttttttttttttttattatactctcagttttagggtacatgtgcacattgtgcaggttagttacatatgtatacatgtgccatgctggtgcgctgcacccactaatgtgtcatctagcattaggtatatctcccaatgctatccctcccccctcccccgaccccaccacagtccccagagtgtgatattccccttcctgtgtccatgtgatctcattgttcaattcccacctatgagtgagaatatgcggtgtttggttttttgttcttgcgatagtttactgagaatgatggtttccaatttcatccatgtccctacaaaggatatgaactcatcattttttatggctgcatagtattccatggtgtatatgtgccacattttcttaatccagactatcattgttggacatttgggttggttccaagtctttgctattgtgaatagtgccgcaataagcatacgtgtgcatgtgtctttatagcagcatgatttatagtcctttgggtatatacccagtaatgggatggctgggtcaaatggtatttctagttctagatccctgaggaatcgccacactgacttccacaatggttgaactagtttacagtcccaccaacagtgtaaaagtgttcctatttctccacatcctctccagcacctgttgtttcctgactttttaatgattgccattctaactggtgtgagatgatatctcatagtggttttgatttgcatttctctgatggccagtgatgatgagcattttttcatgtgttttttggctgcataaatgtcttcttttgagaagtgtctgttcatgtccttcgcccactttttgatggggttgtttgtttttttcttgtaaatttgtttgagttcattgtagattctggatattagccctttgtcagatgagtaggttgcaaaaattttctcccatgttgtaggttgcctgttcactctgatggtagtttcttttgctgtgcagaagctctttagtttaattagatcccatttgtcaattttggtttttgttgccattgcttttggtgttttggacatgaagtccttgcccacgcctatgtcctgaatggtaatgcctaggttttcttctagggtttttatggttttaggtctaacatttaagtctttaatccatcttgaattgatttttgtataaggtgtaaggaagggatccagtttcagctttctacatatggctagccagttttcccagcaccatttattaaatagggaatcctttccccattgcttgtttttctcaggtttgtcaaagatcagatagttgtagatatgcggcattatttctgagggctctgttctgttccattgatctatatctctgttttggtaccagtaccatgctgttttggttactgtagccttgtagtatagtttgaagtcaggtagtgtgatgcctccagctttgttcttttggcttaggattgacttggcaatgcgggctcttttttggttccatatgaactttaaagtagttttttccaattctgtgaagaaagtcattggtagcttgatggggatggcattgaatctgtaaattaccttgggcagtatggccattttcacgatattgattcttcctacccatgagcatggaatgttcttccatttgtttgtgtcctcttttatttccttgagcagtggtttgtagttctccttgaagaggtccttcacatcccttgtaagttggattcctaagtattttattctctttgaagcaattgtgaatgggagttcacccatgatttggctctctgtttgtctgttgttggtgtataagaatgcttgtgatttttgtacattgattttgtatcctgagactttgctgaagttgcttatcagcttaaggagattttgggctgagatgatggggttttctagataaacaatcatgtcgtctgcaaacagggacaatttgacttcctcttttcctaattgaataccctttatttccttctcctgcctgattgccctggccagaacttccaacactatgttgaataggagcggtgagagagggcatccctgtcttgtgccagttttcaaagggaatgcttccagtttttgcccattcagtatgatattggctgtgggtttgtcatagatagctcttattattttgagatacgtcccatcaatacctaatttattgagagtttttagcatgaagggttgttgaattttgtcaaaggctttttctgcatctattgagataatcatgtggtttttgtctttggctctgtttatatgctggattacatttattgatttgcgtatattgaaccagccttgcatcccagggatgaagcccacttgatcatggtggataagctttttgatgtgctgctggattcggtttgccagtattttattgaggatttttgcatcaatgttcatcaaggatattggtctaaaattctcttttttggttgtgtctctgcccggctttggtatcagaatgatgctggcctcataaaatgagttagggaggattccctctttttctattgattggaatagtttcagaaggaatggtaccagttcctccttgtacctctggtagaattcggctgtgaatccatctggtcctggactctttttggttggtaaactattgattattgccacaatttcagagcctgttattggactattcagagattcaacttcttcctggtttagtcttgggagagtgtatgtgtcgaggaatgtacccatttcttctagattttctagtttatttgcgtagaggtgtttgtagtattctctgatggtagtttgtatttctgtgggatcggtggtgatatcccctttatcattttttattgtgtctatttgattcttctctctttttttctttattagtcttgctagcggtctatcaattttgttgatcctttcaaaaaaccagctcctggattcattgattttttgaagggttttttgtgtctctatttccttcagttctgctctgattttagttatttcttgccttctgctagcttttgaatgtgtttgctcttgcttttctagttcttttaattgtgatgttagggtgtcaattttggatctttcctgctttctgttgtggtcatttagtgctataaatttccctctacacactgctttgaatgtgtcccagagattctggtatgttgtgtctttgttctcgttggtttcaaagaacatctttatttctgccttcatttcgttatgtacccagtagtcattcaggagcaggttgttcagtttccatgtagttgagcggctttgagtgagattcttaatcctgagttctagtttgattgcactgtggtctgagagatagtttgttataatttctgttcttttacatttgctgaggagagctttacttccaactatgtggtcaattttggaataggtgtggtgtggtgctgaaaaaaatgtatattctgttgatttggggtggagagttctgtagatgtctattaggtctgcttggtgcagagctgagttcaattcctgggtatccttgttgactttctgtctcgttgatctgtctaatgttgacagtggggtgttaaagtctctcattattaatgtgtgggagtctaagtctctttgtaggtcactgaggacttgctttatgaatctgggtgctcctgtattgggtgcataaatatttaggatagttagctcctcttgttgaattgatccctttaccattatgtaatggccttctttgtctcttttgatcttcgttggtttgaagtctgttttatcagagactaggattgcaacccctgccttttgttgttttccatttgcttggtagatcttcctccatccttttattttgagcctatgtgtgtctctgcacgtgagatgggtttcctgaatacagcacactgatgggtcttgactctttatccaacttgccagtctgtgtcttttaattgcagaatttagtccatttatatttaaagttaatattgttatgtgtgaatttgatcctgtcattatgatgttagctggtgattttgctcattagttgatgcagtttcttcctagtctcgatggtctttacattttggcatgattttgcagcggctggtaccggttgttcctttccatgtttagtgattccttcaggagctcttttagggcaggcctggtggtgacaaaatctctcagcatttgcttgtctataaagtattttttttctccttcacttatgaagcttagtttggctggatatgaaattctgggttgaaaattcttttctttaagaatgttgaatattggcccccactctcttctggcttgtagggtttctgccgagagatccgctgttagtctgatgggctttcctttgagggtaacccgacctttctctctggctgcccttaacattttttccttcatttcaactttggtgaatctgacaattatgtgtcttggagttgctcttctcgaggagtatctttgtggcgttctctgtatttcctgaatctgaacgttggcctgccttgctagattggggaagttctcctggataatatcctgcagagtgttttccaacttggttccattctccacatcactttcaggtacaccaatcagacgtagatttggtcttttcacatagtcccatatttcttggaggctttgctcatttctttttattcttttttctctaaacttcccttctcgcttcatttcattcatttcatcttccattgctgataccctttcttccagttgatcgcatcggctcctgaggcttctgcattcttcacgtagttctcgagccttggttttcagctccatcagctcctttaagcacttctctgtattggttattctagttatacattcttctaaatttttttcaaagttttcaacttctttgcctttggtttgaatgtcctcccgtagctcagagtaatttgatcgtctgaagccttcttctctcagctcgtcaaaatcattctccatccagctttgttctgttgctagtgaggaactgcgttcctttggaggaggagaggcgctctgcattttagagtttccagtttttctgttctgttttttccccatctttgtggttttatctacttttggtctttgatgatggtgatgtacagatgggttttcggtgtagatgtcctttctggttgttagttttccttctaacagacaggaccctcagctgcaggtctgttggaataccctgccgtgtgaggtgtcagtgtgcccctgctggggggtgcctcccagttaggctgctcgggggtcaggggtcagggacccacttgaggaggcagtctgcccgttctcagatctccagctgcgtgctgggagaaccactgctctcttcaaagctgtcagacagggacacttaagtctgcagaggttactgctgtctttttgtttgtctgtgccctgcccccagaggtggagcctacagaggcaggcaggcctccttgagctgtggtgggctccacccagttcgagcttcccggctgctttgtttacctaagcaagcctgggcaatggcgggcgcccctcccccagcctcgttgccgccttgcagtttgatctcagactgctgtgctagcaatcagcgagattccgtgggcgtaggaccctccgagccaggtgtgggatatagtctcgtggtgcgccgtttcttaagccggtctgaaaagcgcaatattcgggtgggagtgacccgattttccaggtacgtccgtcacccctttctttgactcggaaagggaactccctgaccccttgcgcttcccaggtgaggcaatgcctcgccctgcttcggcttgcgcacggtgcgcacacacactggcctgcgcccactgtctggcactccctattgagatgaacccggtacctcagatggaaatgcagaaatcacctgtcttctgcgtcgctcacgctgggagctgtagaccggagctgttcctattcggccatcttggctcctcctctccctgattttagttatttcttgccttctgctagcttttgaatgtttgctcttgcttttctagttcttttaattgtgatgttagggtgtcaattttggatctttcctgctttctgttgtggtcatttagtgctataaatttccctctacacactgctttgaatgtgtcccagagattctggtatgttgtgtctttgttctcgttggtttcaaagaacatctttatttctgccttcatttccttatgtacccagtagtcattcaggagcaggttgttcagtttccatgtagtttagcggtttttagtgagtcttaatcctgagttctagtttgattgcactgtggtctgagagacagtttgttataatttgtggtcttttacatttgctgaggagagctttacttccaagtatgtggtcaattttggaataggtgtggtgtggtgctgaaaaaaatgtatattctattgatttggggtggagagttctgtagatgtctattaggtctgcttggtgcagagctgagttcaattcctgggtatccttgttaactttctgtctcattggtctgtctaatgttgacagtggggtgttaaagtttcccattattattgtgtgggagtctaagtctctttgtaggtcactcaggacttgctttatgaatctgggtgctcctgtattgggtgcatatatatttaggatagttagctctttttgttgaattgatccctttaccattatgtaatggcctcctttgtctcttttgatctttgttggtttaaagtctgttttatcagagactaggattgcaagaattttattaaatgatttccagcatcaattaaaataatcacgttttttattcttcattcaattgatatgatacaccacattgattgatatgagtattttgaaccacgcttgcattacagtgataaatctcacttgttcataatgaatgacctttctaatgtattgttgaatttggtttgttagtatttggttgaagatatttgcctcaatattcatcagaattattggcctttttctttttcttatgtgtctttctgtgtttttggtatcagggtaatattggccttgtagaatgagtttgaaattattccttccccctgtattttttgaaatagtttgagtagcattgatattagttcttcttcatatgttgggtagaattcagcagtgaagccagtgggtcccaggcttttctttactgggagacattttgctacggctttgatctcatttgttggtattggtttgttcaggttttggacttcttcctggttcaatctgtgtaggttgtatgtgtctgggaatttgtccatttcttccaaattatctaatttattggcctatagttgctcatagtagccagtaaagatcttttgaatttctacagtatcagttgtaatgtcttctttttcatttctgagtttatttatttttatcttctcactttctttcttagttagtgtagctaaaggtttttcaattttgtttaacatttcaacaaaacaactttttgtttcattgatctttgtaatatttccattttatttatttcttctctgatctttatcatttattttcttctactaattctggatttggtttgctcttgcttttctagttctttaagatgcatcattagagtgtatatttgaagtttttcctcttttttaatataggcacttacagctgtaaacttccatatcagtactgcttttgcagtatcccataggttttcgtatgttgtgtttccattattatttgtttcaaaaatgtttttcaatttctttcttaatttcttccctaacccactggctaatcagttcattcacgtcattcagacatattgtttaatttccatgtgtttgtgtagatttcaaaattcttcctgttattaatttctagttttattccattgtgctcagaaaagatacttgatattctttcaattttttgaacattttaaaactagctttgtgacctaacatatggtttgaccttgagaatgatccatgtgctgaggaaaagaatgtgtattctgcagctctttgatgaaatgctctgtaaatatctattagatccatttggtctacagtgcagattaagtccaatgtttctttgttgattttctgtgtggaaggtctttcccatgctgaaagtggagtgttgaagcctccaggtctgattgtattggtgcctatctctctaactctaataatatttgctttatatatctgggttctcccatgttgggcgcatatatatttaaattgttgcatcctcttgcagaattgactcctttatcattatatagtgaccttgtttgtctcttcttatagtttttgtcttgaaatctattttgcctaggtattgctactaagacttgttaaaattaaaaacacagaagacaatgtaaatggtataacccttaacaatgtaaaaataatcatttaaataacaaattaggtaagaggaggcaagcttacaggtagacaagagaagtggcctaagattaaacctcattgagttttttaaaacgaaataaagaaaaacttcaaaatctcaggttcccccaaacttcttatgcaaaagggaggatgattgcaacactctcttccaaatgtatggctgttactaacattatgcatcagtcagattgccatggaaaggtaaaagacctcaggcatctgggatcaggcttccttgatcattcataagtaagttattggctggcctctcagaaacaaagacatgctaattttaagtttagatctaagtgtagctcttaaaactaaagtctgttccattccacactgacaatgtcattacggttttgtcttcccaggtaatagaacaaagtcaggactcattcctctgcctaccagagacgtctgcataattgactttctttactccccttttcttatcagacattcactttaacttacggaaaatgtagatttagtgggcactaactaaagtctcacaagaatgtaagtatttacctaactggctacctgtccctctttctacatgccgcccctcgtccccttaatgaaatgtataaatactaaacctcctgaaaaacctcttcgggaaaacagccacagatacatctgtggctcatgtttttcccagttgtgccctaaaagtcgcttaataaaccttgatgattaagaattaagcttcagtcactcattttgtttgtcaaagacaaaacccaatgaaatcgtctttgcaaaaattcaaatagtgagaaaattatgacagtgaaagagaactgacctaaccaactccatcttgcctttaaccctaaactgcccttgttcattgctgttcttggactgaggtaactatagaaagaatttagttttcactttaactttgaaacaaagatgacaacagcccttttctgaaataaactgccttcttgcctggggacaaaacgacctttgtaagacttacaaattagccacaagattagaaattatggtttaggagttatacaaccagaggccatgagattctgaaccaccccagttgctcctagtgataacatcactatggtaaaacctaagattggtgttcgagatattttccagaccctgcattctgatgcatcacctggtgccacccagaccggtaatgtggttaagctagttatgcgattctaccaaggaacagaagccagcaagatgaaccagctctgacctcctatgatgtcacctctgacctgaccaatcaggtcactgaggtcctcactgcctaaccccttctcagtctttaaaaaactcagtctctgaattttcggacagactgatttgagcagtagaactcctcttatttagacacctctgcatgcattaaactctttctctattccaattcccctgtcttgataaattggctctgtttgggctgcgggcaagatgaatctgtcaggtagttacaccaatttaaaggctttcaaaatcatttctcttaaatttaaagtatgttttaaatactaatctcatttgcaataaagaaaaatttatcttaagtaaatcaatttcttcagctgcattaatgttcctctttgtcaaaatcaagcaaaagaagcttaaaatttttaaaattaaaattatatatagagtttatttgcatactatagcttataaactacttatggtttgtttatgtatatataaatattataaatatatatataaatacatttttggaaaaacatatatttccatttatctatccatcaatccattcacccattcttttatccatttatatctagatttacttttatttgcttttctatctgtatatttacatagatgagatgtatgactgaaatatttctcaccaactattaatgatagttatttctagatgatattctgtgcaaaatgtttacattttcctcttcatactcttctgtattgattgaatgtttaaattctacccatatatcattttcaaaaaatgaagtcattattcctttaaaaaaaaacagtgtactgtacaatgtcataatacttttcaggtaccatgaacctcactttaaatcataatcccaattctgtggcagcttccactcaaagtcatagaataaaggtatcagctctttagaacaaagcaatatgccattataatatccttaatttaaggaacctaaaatattgagtgtagtatagttaactgtataactccaatgcagttaaattagaatttctgattaaattctaaatggttgtgccaaattcttagctgagagaactgaaatatatctctatcatagacaattcctttccaggaaagttaaatgaaaaggggagatagaggagtctttgaattaaaaagctccagtaaagaatactttgctgtgaatgcaataatataacaagctagaactagaatcactaatgagaaagtgtataccaaaatactgtaaacaagcagtaccactagctgagaggaaataatctcaaacacagctgagtagaaagcaaaattcaagtatctggggatatctgtaaaacaaagtgtatatatgtgcatatatgatactaaaaagcactacatcaagtatatgttaattcatttattcagaattcaaaatgtgtactaccattctagggtaaaaatgttgattaacagtgatgacatgaaatctatcacttgaaataataaacaaaatttattatctccaaattatgttactcatagatgttagacaatcttaagcattttgcttaagatcatagtggcatggaatagagctaatgaaatgtggtaatgccaccataggccatcaggtaataatgtcattaaaattacactaaaaaggaaacaaagaaaaacgtgttttcttcatgtgaccagattttaattttgagaaataaactctgaaagcattttaagccataaattagtctcaaatgaataggaaaaataacaatttttgcttatatcatgcagagaaaggcattcatttattatccagaagaaaatttcatgtggtgcatttatagttaaacatcttgaagcaaatcatcacttaaattcacagtgtctccattggcctttcatcaaaagagaaatatacttcaaaagtttacttcaatttgctcgttaactatgatttcgccttttctaccctatagcatttgataactagatttaaaagaatatcacacaaaccttcttaaaatattgataaacatgtttagataagatgtttttcttatcaaccgaccatatcagaaaagaagagataaactgttagactttctttcttgcccctaattatgtgtcagaaaggaaaataaggccgggtgcagtggctcacacatgtactcccagcactttgtgaggccgaggcgggcagattacctcaggtcgggagttcaagaccagcctgaccaacatggagaagccccatctctactgaaaatacaaaattagccaggtgtggtggtgcacgcctgtaatcccagctactcgggaggctgaggcaagagaatcgcttgaacctgggaagtggatgttgcggtgagccaagactgtgccattgcactccagcctgggcaacaagagtgagactctgtctcaaaaaaaaaaaaaaaaaaaaaaaaggagaaaaggaaaatgaatcacacctttctccttctgcaagtcacaagattcttttccattaaatgtggtggtgcaaaaaaaagtaaagcttgatgaaagaaagacaatgtttccatggcacccttagtacagcaaatttcaaaataaacccatttccaattggctgctttacaacttagtttaactttttttggtaagaatcactttgacataggttaacaacataaacaggttgacttcttttcccagagtaacataaacatgttgtttccaactagtttaccagttttgcctccatgcccaaaagttcaggcaagccccagataattttgtcttagccagtaaacaggatatatgtggaaatgagaaaaatgagtttaattaggaaacaatactttgttacagctgagatgattttaaatgaagcaaatggttgtaaaccatgaatgacagagcatctattttgggacattatggcttattaacagaatgctatttactttcaacttcacaaataaacacagctgtattgttctgaaacatgatgaaaggcatgcacctctactagcagatttagcacttctgaccatcaaaaacaccaacttccttaaaaatgtgcttcatgcactgtattagatttcattaagatatacattttaatgccttatttcttttttgaacttgaatgggaaccagaatggaatgatccagaagatgacctgtggtgcttgggtaaagtaatgtgttctgtaagggttggccctgggctcagggttgtttagtgagcccctgtgggacctggaactggatcttgatttcaacccagaggatcttaaatgttctctggaactgaaacaagatcttgactgtgaactagaacttcttgaagggaacctggacctagaccttgaatttgaaagggagaatgaacatgatgaagatagtgaatgtgaagattgagatattgagtgactttttctattagatttctttttattactatcgccttcttcactgacgtcaatattatattttgagagatcagcatcatcttcatcctcatcttcatctaatttatatttagaaagatcttcatcctcatcctcttcttctccctctgattctttacttcaacctcctttcatatagatgcaggaccaacaggcttccctctgcattttttctttttatatccaaactcatcatatttaccttcggattcttctcattctatatattcaacattatctttttttttttttttttttgagacagagttttgctctcgtcacccaggctggagtgcagtggcgcaatcttggctcactgcaaccttcgtttcctgggttcaagcgattctcctgcctcagcctcctgagtagctgggactacaggtgtacgccaccacgctcgattaatttttgtatttttagtagagacggggtttcaacatgttggccaggatggtctcgacctcttgacctcgtgatctgcctgcctcggcctcccaaagtgctggggttacaggcgtgagccaccgcacccagccaacattatcttttattaaagccaccaacatatctgttctttcttctaatttatcatactttggagtattacatgttacactctgatcttctggtccaattcacattactgcaagttataccttgccagtcattagcattaaataggcatcagctattttctgtaaatatttttgctattttaaaatgtgcccccagctttcatcatcttggcctgtcgttttctttttaagtattactattattaatattattaatagttgcttttacaaattatgtttttgttttcatgaaatgatattcataaaatttggtcaagttgtatttttctattttcagtgctcaccctcatacaattataccatagcttcccctttctggagataattttgattattcatgtttttattttccttatgatctccaggtaatgacttgtacttttgtggttttctattacaggctttcaaattctgattttgaatgaaacaatatactgtcctatctctttgctctgcttagatcgatctttgaagaaataacaagagggaaaactaaatggcacatggtttccactaattgtatcatgaattgtctttattttatcctctacaccacattttctatgtaaagcgtaaggggaaaataaattaaaataaaataccagtcagtgaatgaagacagaaaacattttaagagtaacaatagcaacaaaatttccacaaccatagagagctaccacaaagggcaaaaaaagaaatcctatgtataaataatggaacagtgtttaaaaaatctagacacagtagagcttcagcggtaaggcaagactgaggtttgagtggccagtctgaagtttacataagaatagcttcttaagaaaggatttcaggtaagataccttggaagttaaatttcctagtaaagtggatactgttgaattcatttataagacaacaaattcttttgctcataaccccagaagattcttgtcacaggacggcaaaactaactaatcaaattgttagaagtagctgtagtttaaaaaaagcagagccttctctttcccctacaagcatttagtttcctcatcaataaccctaaaagcttcccaataaatcagacatatttctacatatataaatctgctttatatgaggcaaacatcatgtctaatttctggagatattgtcaatttgtaatctgagtatttttagtgtattttgcctgcaggttaaaaaatgccctatttcagcaagtcaattaaaaataaatgttttgaaatgaaaaaaaaaaaaaaagactgagtaccaatatgctttggctctgtgtccctacccagatctcatgttgaattgtaattcccaaagttgggggaaggacatggaaaatgctgatagtaatatggacagtgaaatccaggctgaggtggtcccagatggagattaagaacttattgggaactggagtaaagattactcttgctatgttttagcaaagagactggtggcattgtgcccctgctctagggatctgtgcacctctgaatttgagagagatgatttagggtatctggtggaagaaatttctaaacagcaaagcattctagatgtggcctggctccttctaaaagcctatgctcaaaaaaataaataaataaaaataaaaataaaagcctatgctcgtcttcataaacagaaatgatctgaaactggaacttgtatttaaaaggaaagcagagcataaaagcttgaaaaatttgcaacctggccatgtggtagtacagaaaaacctgttttctggggaggaactcaagctggctgcataaatttgcatatgtaaagaggagtcaaatgttaatagccaaggcaatgtgaaaacacttccaaagcatttcagagactttgtggcagctcctcccatcacaggcctggaagcctaggagggaaaaatggcattgtgagccaggacaagggccccactgctctgtgcagccttgggaaatggcactctgtgtcccagccactccagctctagctgtggctaaaagggtccagggtatagcttgggccattgcttcagaaggtgcaagccctaagccttggtggcttccacgtggtgttgggcttgtgtgtgcacagaagtcaagaattgaggtttgggagcttccaccttgattttggaggatgtatggaaatgcctggaggtccaggcagaagtctgctgcaggggatgagccctcatggagaacttctactagggcagtggggaaggaaaatctggggttagaacttccacacagagttcccactgggggactacctagtggagctgtgagaagagagccaccatcaccatcttccagaccttagaatagtagatccactgacagcttgcactgtgcgcttggaaaagctgcagacactcaacgccagcccatgcaagcagatgcgtgtgctgtagcctatacagccaaaaaggtggagcttcccaagccttgggaggccaccccttgcctcagtgttgcccggatgtgatacatggagtcaaaggagaatatttcagagctttaagatttaatgactgtcctgctggcttttgtacttgcatggggcctgtgatcatctttttttggccaatttctcccatttggaatgggagcatttacccaatgccaactaacttggttttgattttacaggctcataagcaaaagggacaagccttgtctcagatgaaactttggactttgacttttgagttaatgctggaatgaattaagacttttgggggctgttgggaaggcatggttgtgttttgaaatgtgagaaggacatgagatttgggaggggccggggaacgaaatatatggtttgtgtattagtctgttctcatactgctataaagaactgcgtgaaactgagtaatttataaagaaaagaggtttaattgactcacagtttcacatggcttaggaggcctcaggaaacttacaatcatggtggaaagggaagaggcacatctcacatggcagcaggtgagagagatacatgtgtgtaggaagcaaagggaaaagagccccttataaaaccatcagctctcatgagaactcactcactatcatgagaacagcatggcagaaaccactcccatgatctgatcaccccatcacatctctccttcaacacccgaggattacaattcaagaggagatttgggtagggacacaaaacctaacagtatcagtttggctctatgtcctcacccaaatctcatgttgaattgtaattcccaatgttggagaagggacctggtgggaggtgatttgatcatgggggcagatttccctcttgctgttctcataatagtgagggagttctcatgaaatctgatggtttaaaactgtatggcactttccccttcactctctctctttcctgctccaccatggtaagatgtgttttcttcctctttgccttctaccatgattataagtttcctgagggctcacagccatgcttccagtacagcctgaagaactgtgggtcgattcaaatttttttcttcataaattacctagtctcaggtagttctttatagcagtgtgagaagggactaataccagtatgtagatggtggtttggttcccatactattcattctgtgggtcttgaatttggggcagctgcactttcttcctcgtcaccgtttctagactgtgagatcacactcactttctctccataaaaacacccagaatccactccctctcatttctttagctcctgtatcaatgccattttctcaaacactgactgtcataatttgtggagatttaagtatccacctagaagatcaataaactagcctcatagttctggagctcctctcctcttataatctgatcttccattttagctcagtcacttaatcacatggtgtattagggttctctagaggaacagaactaatggaatagatagatagatagttagatagatagataggagtttattaagtattaactcacatgatcacatgatcccacaataggctgtctgcaggctgaggagcaaggagagccagtctgagatccaaaactgaagaacttggagtctgatgtttgagggcaggaagcatccagcatgggagaaagatgcaggctgggaggctaggccagtctctcttctcacattttgctgcctgcttatattctagtcatgctggcagctgattagtttgtgcccagccagattaaggatgggtctgcctttttcacccaactgactcaaatgttaatctcctttggcaacaccctcacagacacacccaggataaatactttgcatccttcaatccaatcaagttgacactcagtattaaccatcacaagtccaccccttatctacttgaacccatacacatctcctgagatcatacataatcttcaaataaagacaataatgtcataattacacctaacataatacaactatccttcatacaaccagaaatgcaccaattcccaacccaaataatatcatataaagttaacaatacttaaatgctaatgtaaagttaataaatctcaagtcacatgaaaaaggagaaaggaaataaaatgaagatattttattggtacaagtgtatacatgcacaaacatgtttttcacaaaagaagggggaaatattcatgacagttacagtcctcgtttctgtagctggtcacatcattgtaggtggtattgaagaccaccttcttctaatacccattctgtattccctttgccttcagccagcacctcagaaggtcgtgggtgtttgttgttgtcattgttgttgttattttgttttgtttcttttttttctggtggagtaacccaaactttcattcatgatgggtctggccatttgtagtcctgcctggattgggctgttgtattttcccattgaccttaatcacagggcatggtaatactaagagatgccctaatggatctcctgtattccatgcgtactcttctttacctgccttatggagtagtagactgatttcatcttgatagcctgggtcaatcaccccagccaacactgtagctcccatcttagcctgttgacttaaagataggaggagcccaaagtttacagctgacaattttaacttctagtttaatggaattgttgttgtgtctcctggtggcagcattcatccctctggatctaagacctctaggccagcagaatgtaatgtcacaggaacagaaagcaaaaattttgctaatggatcactaggggtgatggtgagtggtaccacttccacttccaccccttgattcctggacccatgaatctggctatgggagaaacagtaccatatattggacacttattcagagcatgcacagccctctggagaactttgccccagccctgcaaagtattgtgacctagttggtgttgtaattgtgacttcaaaaggccattccactgttctatcaatcctgctgcttcaggatgatggagaacatggtgacaccaatgaattctatgagcccaccgccgcactgctttagctgtaaagtgaatgccttggtcagaggcaatgctgtgtggaataccatgaccacagagaaggcattccatgagtccacagatggtagtcttggcagaagcactgcgtgcaggataggcaaacccatatctggagtaagtgtctattccagtgaggacaaacctctgccatttcatgatgaaagaggtccaatataatcaacctaccaccaggtagctggctgatcaccccgaggaacgttgccatattgagggctcagtgttggtctctgctgctggctaattgagtacccagcagtggctgcagccaagtcaacctacaaaagtggacttccattttgctgagcccatgtgtaacctccatccctgccaccatggccactttgttgatgagcccactgggcaatgacaggggtggctggggaaagaggctgagtggtgtccacagaatgggtcatcctatccacttgattattaagatcctcctctgctgagatcaccctttggtgagcactcacatgggatacaaacatcttcagtttttgacagctcagagaggtctatccatatagctcttcccaaaatttctttgtcaccaatttttcaatcatgcttcttcaaagtccctggccaaccagccaaagcattggctacagcccatgaatcagtatatatttgcacatctagccacttctccttccatgcaaagtgcacaaccaggtgaactgcttgaagttatgcccactgggaagatttcccttaaccaccattcttcagggatgtcctagaaagagaccgtagtgttgcagctgttcacttttgggtggtgcctgcatatcatgcagaaccatctgtgaaccaggccctagtattctcttcctctgtcaattaatcctagggaactccccaagaggccattgttgcaggctgtgggagagaaggcagggtaccaggagtggagaccatgggcatttgagccacttcctcatgtaacttacttgtgccttcaggacctgcttgagccctatcacatatatgccacttccatttgatgatggaatgctgcattatattggacctctttcatcatgaaaaaggcagaggtttgtcctcactggaatagacacttactccggatatgggtttgcctatcctgcatgcagtgcttctgccaatctactttatgcataacctactttatggctagatgggtcagaaagtgcccagttcatgataagcagttcaagttgcatggtgacttgatgatccatagtcaaacattcagtttccaccaaagcccagtaacaggccaaaagctgtctctcaaaagagtagttatctgcaatagcagttatcagatgatgccagggccttgctccaaaatcctagaggcctccactgtgattcaccaatggaggcctccaaaggctccagacagcatccctatctgccactaacacctaaagcaccattggatctgctgggtcatgtgtcccaagtggcagagcagcttgtacagcagcctgaacctgttgcagagccttctcctgttctggggcccactcaaaactggaagccttttaggtcactcgataaatgggccagagtaacacaccaaaatgaggaatgtgttgcctccaaaatccaaataggcccactaggcattgtgtctctttcttggttgtaggaggggccaaatgcagcaacttatccttcaccttagaatgaatacctcaacaggctccacaacagtagacccctagaaattttactgaggtaaaaggtccctgaattttagtcagatttatttcccatcctctgacacacaaatgtctcaccaataagtccagtgtgtttgctacttcttgctcactggatccaatcagcataatgtcataaatgtaatggaccagtgtggcatctcagaagtgaaaagcaatcaagttctctttgaataagattatggcacaaagccggagagctgatatacccctgaggtaggacagtaaaagtatactgctggccttgccagctgaagacaaattagctctggtgggccttatggacaggaacagagcgaaaggcatttgccaagtcaatggctgtataccaggtacccagagatgtgttaatttgctcaagcaatgaaaccacctctggtacaacagctgcaattggagtcaccacttggttaaacttatgataatccactgtcattctccaagatctatctgtcttcttcacaggccaaatgggaaggttgaatggggatgtggtgggagtcaccaacactgcatttttcaagttgttgatggtggcactaacctccgcaatccctccagggatgcaatattgttttttatttaatatttttctaggtagagccagctctaatggcttcaatttggcctttcccaccataatagcactcacctaaccagtcagggagctaatgtgggggttctgcaagttgctaagtatgtctatgccaattatgcattctggcactggggaaatgaccacaggatgagtcccgagacccactggacccactgtcagtcggacttaagctaaaactctgtaattacctgacctccataagcccctactttaactggaagaccacaatgatgttttgggtcccctgggatcaacatcacctcagtgccagtgtccagtagtccctgaaatatctgattatttccctttctccaacgcacagttactctggtaaaaggccggaggtctcctggggaaggatgggagaaagattcactgcataaattggcagtaatgttgtggcatccttcctcaaggggacccagcctctccttcactcaagaggttctggactgtaaactggctcaagcctggaaattgattgaggggccatgattctctctttttataattcaaattagtcttttgtccattcgacctagaagttgtctgcttgtatatattaagtagaaatgcagtaggcttcctataaatttcacttctaggaacaccgtaattaattagacaatgctagagctctacacaagtcagactattctgattgttgctttgcctctgctgtcaattatggtagctatgcccacctcacctttgatggttaagtgccaccactcggctcctgccacctcaggatccaattattcccatggtatttaaattttgtagttgagtgactgcagttcccactgttagatctgacatatggagaagagcaattacaaggctcttcaaagatgcaggtgctgccctcgcaaaatctatttcacaaggccttggtcatgggtatattttctgggtcctcccggctgggatgactaggtctaaagtgactaatccactccaccatcccaatctccctaaggctttggatcccttcctctatattaaaccaagggatatcaggcatttctagctggctcacagtgggctatcttttaatcgatatttcagctaaccaagcaaataagctattagaaccttttttttaagctcctcaagctgcaacattaaatacagagttcctacttagtgggcccaaatcaataaattcagcctgatccaactctattttccttccaccattatcccacacccttaatatccattaccatgcctgttctccagatttctgtttatacaaattaggaaactcaagcagttcttttcaagtgtaatgcacctccttatgggtcacactttcaacctcacctctaggggcctgctgggatattaatctagttataggtctagaagcaaacaggggtgttgggggtggcttctgaggagaatcaacattatcttgactggcaactgcctcaggggaggccatcactgttgcctcagggagcacaggtttatgtcctcagacaaaggtggaagggctgatggcagcatgggtatgggagggtatgttgccactaccgtagatgggaaagctgtttcttctggcaaagaaagcttaatcagagtttaagctcagtgtcctaagcttcatcagggtcctcctgcatgtccccgttccaagctgcaaggtcccattattttccaaacgatgccctcactttaacagtagacacctgacaaggctgtgcatgcacctttcattgcaggtcagccacttgcatgataagagcttgtgtctgcttttacacaattttagctctttctctatgggagataagactctcactcagggcagtcttggcagatttgaggctcagaatctgcttctgaagctgagagatagaatccctaagttcatcattttcattcatccctttgtccactgaggagtaaccaaccagcttctatatgttccttggttctccacatatggtcaaaggtattaagtacagggtcactaaactccttgcctctcacaagtgatgaatcaggactatcaaatgcatttattttgcataactctctaaaccgttcatgctaaagactatcagtgctctctatattattagaagttgggtccttagcatttctgtaaacagttcatgccaaagactatcagtgttctccatactatgagaagtagagtccttaacatttctgggtctattcatattattaagcagccaactccagaaaccccaaagttaatgaaagaaccccatacttaataatctgctcctttagaaccacctcacttctggtaccaaacttgtgttagtcagggctcgctagaggaacagaactaatggaatatatgtgtatgtgtgtgcgtatgtgtgtgtatatatatatatatatatattccatatgtataatggaatatatatatatacacgtattccatatgtataatggaatatatatcatatatatgtatatatatgaatttattgagtattaactcacatgatcacaaggtcccacaataggctgtctgcaggctggggagcaaggagatccagtctgggttccaaaactgaagaacttggagtccaatattcgagggcaggaagcatccagcatgggaaaaagatgtagggtgggaggctacaccattctttgtttgcacatttttctgcctgcttatattctagtctcactggcagctgattagattgtgcccagccagattaagggtaggtctgccttttccagcccacagactcaaatattaacctcctttggaaacaccctcacagacagacccaggatcaatattttacatccttcaatccaatcaagttgacactcagtattaaccatcacacatggtcatactattgaccttagttttacaatatctgcaatcactccttaatttcaattgtaaacattcaactgctaaactaccactcttatgtttccagccaacctcttttgctaccttgacagagataatttttccactaaactaagacctgtaatcattgatcctaaagcttttcacttgttcttactccctctatatcctcctttccatcttgatgcagcttcaatttaaaagtcagttaatgtaatgaattttgtgcacatatcctactgtatctcctctagctccccatgcttctctcaattcactttacccacctagtgagactagaaccttagttaaataaaatcctccagctgcttatctttgcacccctgcatctgaacatttctgtagaaaacacaaaaccacactgaatcttcacatttaattcatgaccactaacttcaaacagaaccttaatcctgactagctttcatgctgtatttccctagctcacccactctcccccacttctagctgactattatatccttgctcctatttctttaaatctctagcaccacttttttcatccttgttctcagacaataagcgtgtttcctgttttcttttccattgagaaaactgaattaccaaatgagaactcccatactttctcaccactacttttacctacctgcctgtacctgtatttttatattctatttcccttccatttctatgaatggcttcccatgctcctagccaaggcctatgcctctctccctgtgaataaaatcctatcagcattccacaactcaaaggcatttttccagacaccctccctattttcaccattaaattttgcttctttgctgaataattcccagcaggaaacaagtcattacttctcccatgacacacaaaaatatctcaaacctatttccctttcagctaccacattgcatctctcttttactttacaggaaaaagaaaaaaacctaaagaattatctgtacttccttgatttatcttctcccattccctcttgaactcactgggttttcacaaagctatccacagaaactgatcccctcatagttgctaattatctcatacggaatttatctgtcctctcatttggtctctcagcagcatttgtcagaatttatctttctctccaccttaaaatattttgtcactccactttcaggttagtacagtcacttggttttcctcctatctttctgactattccttcttaatatcttttgttagtttctcctatctgcagcctaaaaacatgtgttgccctaaagttcagtcgtcctttccatttatacttgcttccttggtgatctcaagtctcaaggctttaattatcatctacacgcgataactccaaaatccttatgcccaagtcagactcttacatgaactccagacttgtacatccaaatgtttattggatatcttcacttggttgcctaacggtcactgtgaccattagaacacatctgatctgtgttcacaacattcttcccccaaagctttttcttccggaagtcttcccccatctgagttaattttagttatttttgtcaaaaatgttgtttttacctatgatttttcacattctcccacacttcacctcttttccatcagtatattctgttggcactaatatcaaaatatatccaaaatttgacatttccactacttcactgccaccaccttggtctaagtcatcatcatgtctttcttgaattaatacaattgatcattctgcttctgttcttgctctcttatagctattttctccacacagcacagagtgatcctgtgaaaactggtcagataatgtcgctcctcttctcaaaatcctcccatggctttccacagtaagttaaagttcctactatggcaatcaaaactacacaactgtctttcctttcctctctgacattatctcctactactcttccttaggtttctccaaagagaacctcctcactgttactttcacatatctggcatgctcctggctcaagggctttcattcatatatataactaattatatctggaatgttcttcctccagagagcagcatggtttactcccttactttacctctaagcacatatatctctgaatcagtaactccatctgaaacgtacaatctaccacactatttctaattattgttcccagctttattttttccttatcttttatcattctttaacacattgttttatttatttatactgctttgtgtcttttcaagcagaatgtaagtgatgtgtgtgtgtatatatatatatatatatatatatatacatataactattgtttctctgagcctagaacagcgttgggaaataatgggttctcatttattgaataaaaacattaatgtagatattatttattactctttatttcctttccccattctttttgtttattttcatagactgacctttatactgatcttagaacatgcaggtctgtgttctttgtctatcaacttatgtattttattttctttcaatggaatgcattccaagagaatttcctgctttaagcttctggtttaccaatgcactgatttgctcttgctctcctattgagcaaattcattgattattttaaaaattgataattatatttttaagagcttaaaccttgaattcatgaggttatttgttcttatcctatttcaaaaattatggaccatcacagaaactttgttttagaagttctacctctgattacaaaatattccacataaaaatatgtatcgatatttgcttaacccaaactcccatattaattaatattaaagaatgaatcatcttttaacaataatgcactagatgtaagtaaagctgaagactaaggggtcaatacattgaaataacacctttgaataaggagattcaagagccattttaactttcctccaacacaaagataaagtatttcaggcagaaggagtttctagttgatattttttttctaaaaagaaataggggaaaaatctgtatctttaaagactttaaaccttggtgctatcatggggtttagataaaactgagatagaaaatgaaaagagttgaggtcagtcaatggtttgttcctttcaaacaaagaattctaatcttaaaattaccagattccagaaagaaatgttctgttatataagctggaagagaaatcaaaagcaccacatccatgacagcataggtcaagaaaatataaagactcaaaactttaaacaaaatttcaaacccagcaagaacaaatttgggtttaaaatctagaactaatctgacaattgacatcagtgaggaagaagaaacgtttcttgctactaggagattttattagattcttttaataagcgttcacttgccctttatatactctgatttagttctctaaatttttactgtggcattttgtcatttttatatagcctcaaagaagagcctggaattaatattaattttgaatattaaatatgcatatttcaatttttttaactttctattttttcttaagggaataattatcactcactttgccagtgatatattataagaaattataataaacacaagttgcattttatattaatttatgtgagattgaaactaatcatgtaagtttctttcttgtccttttttgttgcatttttatttttttattttttatttctttcattttaagttcaggggtgtaagtttctataattagtccactctttcttgttctaaattatctacaactgataatctccataatgatattcagaaaataaatatactttatttcttaatttttttagttaaaataatttattaataatatgctagaatagcatctcaatgagcaaatgcagaacaagttcagatcataagaatataatttagacatgtagcatcagatgttgacaatatatttttaaattgtggtaataaaagaaacccaaattttaggacagtagctatactaattagtatactaattaagtatactaattaagctatacttaattagtataagctatactaattaattagtataagctatactaattaattagtataagctatactaattaattagtataagctatactaattaattagtataagctatactaattagtataagctatactaattaattagtataagctatactaattagtataagctatactaattaattagtatactaattaagctatacttaatattttatatataattgtgagacattattcacatcactgttcagttttgagaacacttatctttgccctagatttatttttcatttaattactgttctaaaaatagtactctactttatttaaaaatatgcaatgagatgtattcatttaatatagtataaactcaaaaatagtaagaattttttttaaaaaagagtattcaaggtactttcatttgaaggcaattctacaactatggctatcatttagtaaatacctagaaaagttgatgctagttaagtatcttttcacaattaattacatcaggctttataaaatatcatggtttatattctacttttatttttaaacattcttactgtataataaggcatacaatatgatgttttgatatacatgtagatagtaaaatggttacaagagtcaaaaaattaacatagccgccctcatcttatataattacccactttgtatgtgtggcaagagcacctacaatatacccttttagcaaaaatatcaagtacaatataatattattaagcatagtcctcatgttgcacattgctctcttgatttgctcatcctacatatttgctactttgtatcattttacctacatctccccataccccgtaactattgctttatcctctatctctgtatacttgactctttttaagaatccacatataagtgagattgtgcagtacttttctttctatgtctggcttatttcacttagtgtaatgtcctccagattaatccatgtgtgacaaatggcaagactgaactttttaaaaaagatgatgaatattccattgtatatgtatactacaatttattcattcattcattaacggacacttcagttgtttccatatcttcactatcgtgaataaggatgcaataaacataggcatgcaggtatctttataatgtagtgatttaatttcctttagatatatatccagaaaaggggtttctgggtcatatgatagttctattttaatgtctctaagaacctccattttgttttccacaatagctgaagcattctaaatctctatcagtagtgtacttgtctcttatgtttttgataatagtgattctaacaggtatgagatgctatctcatcatggttttgatttacatttccctgatgattagtgaggttgagtacttttcatacatctgttaatcatttttatttcttctttgaaaacaatgcctattcaggtcctttgccatttttaaattgggttaatttgtttttctgctatttagttgtgggggttttcaatatattttggatactaatcctttattggatatatggttgcaaacattttctcccaagctgtaggctgccttttcatgttgattatttcctttgttgtgcagaagctttttagtttgatgcagttctatttatttatttttgcttttgtagcctgagtttttggtatcatacccaaaaatcattgtgaaggccagtatccaggaggttttcccttatgttttattccaagatttttatgatttcaggtttttttttttttttttttttttttttttagcagagaacatgctttattgaggagtagatacagaagagcacattctaccacatgtggggaagggtttagcttctgtaaaaggcctttaccccttaagaaaacccctagtgaagttgcttttggataaattttaacagtgacactgaaactggaggggagctgccactgaacatgcttaaaattagctccctcaacccacagtgaatataagtagtgtacagagatgacaagagaaaggcacaaatgaccggagtcagggattgtggtgagggctccacatgaagacagcatgttggaggagaccaagttgggaagggtgacatgtcatacatcaaaagttgcccgaagatagcaggttataatgggctagagagaaattagagggaacatctcttccttcacttgaacaacaccaaaaatagaagaccagagaatagaaggatggtgacaaatcccaaaaaggaaatggaggaggagttcatggaaaagcagaagcactttaatcctagagggagggtgaggcactgtcgaaaagagaagcaaaccttggcaggggtggccattctgccttgctgagtcatgggctgagatacggaagtcactttcagtcattttcaacttctcccagggcattcagacaaaatcagtgcaaggtatatggaagtacagatgtactgtatcagactagtggaggtgaaaagttttctgcagtataattaaccagttaacatgcagcatgaaagggagaagtggacattattttggcatctgcaaacgtaaaaagtgggagtaaagagagaatgaaatatttactagtgggtactttacagtgaggcaaaaagtagtatccgctccctttcaccaagacactgcccactgcccacaggtgaactcaaatcaaacccagaaccaccacctcttcattcttctctccatctcattcagatcaattatatgctattaccatgactagtccctgggaaactcttcaaaagtatttggctctggttagcccaatacagatcaaaaagaggtctcttaatcaaaatgaaggaaagaaatttaaagcaagatggaacccaaagtgaatggaccccctgccaatctacacacaatcacaagtgccacctcttccctgcccctccatagaacacacatataaggagtaactggaaaggtcctggtggtggcagccatatttggaggtctggtgaccaggtggcaagcactagtaccacgcttagaagacacaatacaacctcatggggtgagaggacatgaggagagaaccagtgactggacaggtacagtaccataacagaactccttgggtcagtgctgagagacctgcactcaagtctaatacagatcccatccaggcaacctcactgaggccgaaacaacagttcctcagaaccagtgtctgcagtgtacacaaagatcggagccaggacagtcctgagggggatggccttcccaaaggatactgtacttgccaatcacaagagcaacagaaatgaccgacagatccctaaggtacggattcctactgctggggttcgctggctcggaatgacaggtcgctttaagggcccttgggaggggtccattttaagcagctgggatccatggttttattggagttggaccttttggcctctttggctatctactcatcaatcaggtcctgtctctttaaaactaggtgttttcccttccagtacttgagcacctgaagggcttgcagagtgctgacaatgtccacaggattcacagccgtctcctgactgatttctttgatagaaatctctttgccttggaaattacgcagttagcggagaagtacttctttccagtaactgcaacagcttataagccccagatctgagagtggacattctggggagccaactttttcttcaactttggaaagcaaataactgaaatcaataagcatcttgccatagccctgtctcatgtactgaggcatagtaaggatacaggatacgttgtagttgaggaatgaattcttttccttggaaaaatatccaatcaggtgacagccagtgttgtccgcctctgtcataacatagaacaggaagggctccacatcataatataatgtcttgtggtccagaaaaagtttggccagcaggcacaggttttggcagtagatcttgtttttcttgccatccacttcaaacacagagactgaacctttgcgatatatctcatcaccaagtgggtgtttccacacacatttggccatgtgctggcggagtatcatttggctcttcatatattttaaacagaattcacacatatagagacgtcccagccgtgcatattcttcaggatatggagaatggtaccaggtatcaaggtcatagcgaccaaaagcaattgttttaatcatgttgcttccctctgtgatttggccttgcagccttaacttctccaaatcctctgaagcccgggcttgtgctcttcggaaaagatccaagtcttactcgcttgtcaagttttctaaaagaggttcccctgtgttcccataggtctgtctgtgttccatggcagacactacaagaatcctttccaggaaagaatgatttcaggtcttttagccattttgagttgatctacagtataagggtccaattttattattctttttcatgtgcaaatccagctttccttgcacaatttattgaagagactattttttctccatgggttatctcagtacccatatcaaaattagctgtccagaaaccagaaatcctgagaggacccacagaccctctgaaggaagtggactgctcctgcaggacccgagagacaccccaaatactgtgagtgccccaattgcaaaagtgggaaagggagaacctcctctcctgaacacacacacacacacacacacacacacacactggagaaggtgaaggtctgtttgcaggagaagtttccgactttatctggagctgagtcagtttagagtgccaagtgaaaaacaggggtagagggagcagcagaaaggccctgggaccttgctgggtcccctagcaggccattcttgcctagcaccacagggatctatcggaagggtggctagaggagcaggggatacaacttcacagggagaaggaaatctccagctgaactttgcaacaatttgaacagggcaaggagcctcctggccagaactcaaggtagggcgcaaatctggtgtgcagactccacaggcgggggaggaaccaagcccttttcttctggagttgggaggcgggtaccctggggcaagttttcaagcctgactcaccctctgcctgcaaacagacttggggctgttggagggggcacggtgggagtgagacctgcccttcggttggcatgggagctgggtgaggcctttgactgctggctttcccccacttccctgacaatgccacaccttaaaattttggcaaacatatgaagaattttcaggatttatcactgtgttacctaatccctgaggattctacaagagtgtaatgctatacctctgtagcatatatagctaggatgatggtaatattttacttgaaaagtagatatacactatattacactatagctgaaaaactactgaattagcaaaattttaatagctttatccactattcttccagttaaaacgaattcaccatccaatggagaagactcatttagggtaggaacaatggtctgtagagtctgccttcacaatgtcccctcctactacaaccacttggttcagttccttgtcacttgatgactataccactataattgtctccttactgtctcatataccatgctgatatatcccatgcactgtcaacggatgaatcttcctagagtaaaattgtaatcacatcactctactgtccaaaaatctggaaagatgtcctagtacttagaaataaaggaaatatcttaccgtggtagtcaaatcccttcacagtatagcctcaaatagttttccagccttacctcaaatctttcctgtattttatgtcctacctaacgtggaacttttgtttctacctttctcatagcatttgcttgcacttaagaaatactgtgagaggtggagcaagatggcagaatagaaggcttcatcgattctctccacctcacccaaacaagaacatcaatttaacaactatctacacagaaaaacaaaacaaaacaaaacaaacctttatgagaaccaaaaatccagtgagcccttatagtacctgattttatctttatatcactgaaaaagacactgaagaaactcaaaaaacagtcttgaatcaccagtggcacccctcccctcaccccccaccctactggcaacaacagcctgctctagagagcatctgtgggtgatgggggaggaagaacacagcaattgtgaggcactgaactcagtactatcctgttagagcagaaaggaaaacccgaccagactcagctgacatctacccaagcagggagcatttaaaccagccttagcaagaggggaattgcccatcccagcagtcagaacttgagttcccacaaacctcaccaccatgggctaaagtgctctgtgctctaaataaactttaaaggcagtctagggcataaggactgcaactcttaggcaaatcctagtgctaaactggtcccagaaacagtggcttggcagagagtagggaggaaacacatggcctactgagacagaagctaaggcagctaagggagtgatgacatcattcctcacctaaccccaagctgcaaagctcacaactccaaaaatgcccacttctttccacttgaggagaggagaggaaagaatgggcaggattttttttgcatcttggataccagctcagtcacagtaggatagtgcactggtcagagttgtgaggctcccgttataagccctagctcccagatgacatttctagacacaagctgagaaaacagggcatctgctgccttgaaggggaggaagacacagtcctgaaaccattcatcccctgctaactgaagagcccttgggccctgaaaaactgacagagatacccaggcactaagtcaaggaccatggatgagcctctgagacttgctggcttcaggtgagacccagcatattaccagctatggtggctatagtgtgaaacgccttctgcttaagaaaagcagaggaaaaagtaaaggaaactttgttttgtaccttaagtaccagcatagcaacaggtgggtagagcaccaatagggctattaaggtccccaatttcaggacttgactcttggatggcttctcttgactcttggatggccagaaaggaggcaactgccctgaagggtaagtctcaggccaggcagctttcacaataagctaagatactataacactgtaactgcagtgtgtaaactgctcttatcctaagcagaaagaataaataataaacaaatcaaaaataattactataacaacttttcaaaacatacacactacaataagatgtaaatagaaaaaacaaaaagttaaaaggaggggaacaaagtcagggcatagagtttttattactttatttttgctgtttctttgtttatgcacacactgctatgttgttataaggttaaactaatgagttataagacagtatttgcaagcctcatagtaacctcaaaccaaaaaacatgcaatagatgaacaaaaaataaaaagcaagaaataaaagcatatcaccagagatcaccttcactagaggaagacaggaaggaaagaaagaagggagagaagaccacaaaacaaccagaaaacaaataacaaaatggcaggtgtaagtccttacttatcaataatattcaaggtaaatggattaaactctccaatcaaaagacacacattgccttaatgaattaaaaaacaagacctattgatttgttgcctataagaaacacacctcacctataaagacacacatagattgaaaataaagaaatggaaaaaaatagtccatgcccaatgaaaagcaaaaaagagcaggagtcactatacttctttcagatacaatagatttcaagataaaaactgtaagaagagacaaggaaaaccagtgtataatgaaaaaagggtcaattcagtgagaggatataacaattttaaatatgtatgcatccaacacaggagcaaccaaatatataaagtaaatattattagagctaatgagagataggcttcaatacaataatagctggagaattctacaccccactatcagcactggacagatgttccagacagaaagccaacaaagaaatattggactgaatctgcactatagaccaagtgagtctaatagatatttacagaacatttcattcaaaagttgcagaatgcgcattatttttctcagcatatggatcattcttaaggacaaaccatatgctaggtcacaacacaagtcttaaaacattcaaaaaattgaaataatatcaaccgtcttctctcaccacaataaaataaagctagaaattaataatgaggaatttttacaactatgtaaatatatgaaaattaaacaatatgctcctgaatgaccagtaggtcaatgaagaaattaagaagaaaattgagaattttcttgaaacaaatgataatgaaaataaaacacaccaaaatctatggggtacagtgaaagcagtactgagagggaagtttatagctataagtgatgaaaaacctgaaataaacaacctaatgatgcatcttaaagaactagaaaaccaagagcaaaccaagcccaaaattagtagaagaaaagaaataataaaaataagagtaaaaataaatgaatttgaaatgaaaaaatacaaaagatcaatgaaattaaaaggtggtttttttgtaaagtttaacaaaattgaccatccttttgccagactgagaaaaaaaatagagaagatctaaataaggaaagtcataaataaaaaagaacacattatatttgatacttcagaaattcaaagaatctttagtggctactatgagcaactatatgccaatatactggaaaactgagaagaaatgagcaaattcctagacacatatactctaccaagattgaaccaggaagaaataacaaacctgaatgagatcaaagccataataaaaagtatcccagtaaagaaaacccaggacttgatggcttcactgctgaattctacgaaacatttgaagaagaactaacaccaattttactcaaactatttggaaaaatagaggaggaaatatttccaaactcattctatgaggccagtattaccttccctaatgtcaaaacaagacaaagacacaacaaaaaataaaactacaggccaatatatctgatgaatgttgatgcaaaaatcctcaacacaatactgccaaactgatttcaacaatatattaaaaatatcgttcatcatgacaaagtggaatttatccctaggatgcaaagatttttcaacatatgcaaataaatcaatatgatacagcatatcaacagaatgaaggataaaaatgaaatggtaatttcaactgatgctgaaaaagcatttgatgaaattcaacattccttaatgataaaatttaaaaaaaaaaacaaaaacaccaaagactgggtatagaagaaacatacctcaacataataaaagttacatatcacagatcttcagcagctttcatactaaattgggaaaaattgaaagcctcagacaagaaaaataaataaaggacatccaaattggaaaggaagaagtcaaattatccttgtttgcagatgatatgatcttataagtggaaaaaactaaagactgcataaaaaattattagaactgataaacaaattcagtaaagttgcagaattcaaaatcaacatacataattcagtagcatttgtatgtgccaatggtgtgcaacatgaaaaagaaatttgaatattcccatttaccatggccacatataaaattaaatacctagaaattaaccaaagaagtgaaagatcgctataatgaaaactataaaacactgatgaaagaaactgaagaggacaccaaaaatagaaaaatattccatgttcatgggttggaagaatcaatatggttaaaatgaccataatacccaaagcaatctacagattcaatgcaatcaccatcaaaataccaatgacattcttcacagaaatagactaaaacaatcttatatgaaatcacaaaagtcccagaagagacaaagctatcctaagcaaaaagaacaaaactggaggaatcacattacctgacttcaaattatactacagaaccatagttaccaaaacagcatggtactagcctaaaaatagacacatagaccaaaggaacagaatagagaacccagaaaaaaaactaactacacacttacactgaactcatttttgacaaaggtgccaagaatatacaatggggaaaagatagtctcttcaataaatggtgctgggaaaactggatatccatatgcagaagaatgaaaccagacccctatctcttgccatatacaaaaatcaaatcaaaatggattaaaaatttaaatttaagacctcagactatgaaactactatgagaaaacagtgggaaaactctctaagagagggaaaatattattgagcaataccccacaggtacaggcaaccaaaataaaaatggacaaatggaatcacatcaagtttgatgattttaatatctggaatatctgtccaatgctgaaaatggggtgctgaagttttcagttattattgtgttgtggcgtatctttctctctagctctgataatgtttgcttaatatatctaggtgttccagtaattgaagcatatatatttaaaattgttctatcctcttgctgaattgaccacttttttattatatggtgatattctttacatcttttttaagcagagattgattagatttatttatttttattttttgtgtttttttttatttcaataggtttttggggaacaggtggtgtttggctacatgaataagttctttaggggtaattagtgaaattttggtgcacccgtcatccaagcagtgtacactgtatccaatgtgtagtcttttatccctcgccacccaccaccctttcccccaagtccccaaagttcaatgtatcattcatatggctttgcatctcataacttagctcccatatatgagtgggaacataaaatgtttggttttccattcctgagttacttcacttagaataatagtctccaattccatacaggtttctgcacataacattattttgttcctgttcatgccattttcatggctgagtagtattccattatatatatatatgtatatatatatgtatatatatatatacatatatatatgaaaatttggtatatatatatttatctactcattgattgataggcatttgggctggttccatatttttccaattgcaaattgtgctgctataaacatgcatatgcaagtatctttttcatataatggtctcttttcctctgggtagatatctagcattggaattgatggagcaaatggtagatctgtttttagttcattaagaaatctctacactgttttccatagtggttgtactagtttacattgccaccaacaacgtaaaagtgttctcttttcaccacatccatgccaccatctatagatttttttattttattatggccatttttgctggagtgaggtgctattgcattgtggttttgaattgcatttccctgataattagtgatgttgagcatttcttcatatgctttttggctatttgtgcatcttcttttgagaattttctattcatgtccttagcccactttttgatgtaattgtttgttttgttctggctgatttgtttgagttctttgtagattgtggatattagtcctttgtcagatgtatagattgtgaaaacttcctccaaccctgtgggttgtctgttaactctgctgattatttattttgctgcacagaagtattttttttaattttaataaactccaatctatttatctttgtttttgttgcatttgcttttgggttcttggtcatgaagtctttgcctaagccaatgtctagaagggtttttctgatactacctcctagaatttttatggtttcagatcttagatttaagtctttgatccatcttgagttgagttttgaatagggtgagagatgaggatccaatttcattcttctacatgtggcttgccaattaaatattccagcgccatttgttgaatagggtatccttttcctaccttatgtttttctttgctttgtcaaaaatcagttagctgtaactatttggctttgtttctgggttctctattctgttccactggtctctgtgcctatttttataccagtgccatgctgttttggtgactatgcccttatagtatagtttgaagtcagttaatgtgatgcctccatatttgttcttcttgcttagtcttgctttggctatgtgggatcgtttttggttccatatgaattttaggattgttttttctaattctgtgaagaatgatgatggcattttgatgggagttgcattgaatttgtagattgcttttggaagtatggtcatttttacaatattgattctatgcatccatgagcttgggatgtgtttttatttgtttgtgtcatctattatttttttcagcagtgttttgtagttttccttgtagaggtctttcatgtccgtggttaggcatattcctaagtattttattttaatgcagctattgtaaaaggagttaagatattggtttgattctcaacttggttgctgttggtgtacagcagagctacttatttatgtgcattaattttgtatcctgaaccattgccgaattcatttaccaattataggagtatttacataagtttttagggttttttaggtatatgattatataatcagcaaacagcagcagtttgacttcctctttaccaatttgaatgcccttgatttctttctcttatctgactgctctggctaggactcccagtactatgttgaatagaagtggtgaaagtgggaatccttgtcttgttccagttctcagggggaaagttttcaacgtttctccattcagaacagtgttggctgtgggtttgtcatagatggcctttattaccttaagttatgtcccttctatgcctattttgctgagggttttaatcataaagggatgctgaattttgtcaaatgcttttcatgcgtctattgagataatcatgtgatttttgtctttaattctgtttatgtggtatatcacatttattgacttatgtatgttaaaccatctctgcatccctggtatgaaacccacttgatcgtggtggattaattttttaatatgctgttggatttagttggctagtgttttgttgaggatttttgcatctatatttattatgaatattggtctgtagttttttttaatgtcctttcctggttttgatattagggtgatatgggcttcatacaatgatttagaaaggattccatatttctctatcttttgtaataatgtaaatataattggtagcaattctttgaacgtctgatagaactcagctgtgaatctgtctgttcctggactttttctgttggcaatttttaaattaccattttaatcttgctgcttgttattgttctgttaagagattctatattttcctggttaaatctaggagggttatatatttccaggcatttatccatctcctctaggttttctagtttatgatgcataaaggtgttcatattagccttgaataatcttttgcatttctgtggcatcagttgtaatatctcctgtttcatttctaattgaccttatttggatattcactcttcttttcttggttaatctcactaatggtctatcatttttatttatcttttcaaagaaccagctttttgtttcatttatcttttgggatttgggggggtttttgtttcaattttatttagttcttctctaatcttatttctttttttctgctgggtttgggtttggattgttcatgtttctccagtttcacgaggtgtgaccttagtctatttgtactttttcattcttttcgatgtagtcatttaatgctataaactcttctcttagcaccatttttgctgtagcccagagattttgataagttgtgtcactattattggtcagttcaaagaattttttaaatttccatcttgatttcattattgacccaatgatcattcaggagcaggttatttaatttccatacatttgcatagttctgtgggtttcttttggagctggcctccagttttattttactgtggtctgagagagtacttgatataattttaattttcttaaatttactgagacctgttttgtgtcctatcatgtggtctatattggagaatgttccatgtgctgatgaatagaatgtatattctgcagttgttgggtcgaatgttctgtaaatatctgttaagtccatttgttgtagggtataatttaaatccattgtttctttgttgaatctctgtgttgatgacctgtctagtgctgtcagaggaatattaatctcccccagtattactgtgtttccatctatctcatttcttatgtcttgtagtaattgttttataaatttgggagttccagtgttaggtgcctatatatttagaattgtgatattttcctcttggactggtccttttatcattatgtaatgtccctctttgtcttttttaactgctatggctttaatgtttgttttgtctgatataagaagagctactcctgctcactttcggttttctcacccctttaccttaagtttatgtgagtccttatgtgttcagtgagtctcctgaagacaacagaaacttcattggtgaattcttatacgttctgccattctgtatcttttaaatggagcatttaggcaatttacattcaatgttaatattgagatgtgaggtattattctattcatcatgctatttgttgcctgaataccttgtttttctttattgtgttattgttatatatgttctgtgagatttatgctttaaggaggttccattttggtgtatttcaaggatatgtttcaagatttagtgctccttttagcagttcttattttcaggcctgggtcctttccttcaaggcacaggttcccttctggtccaggatgcatctggaaattttgtctgggagctagggcctggaacatgggttcactactctgactggtgccctatcctgctgtggctgagctggtatccaagatgcaagacaattcatccacactatttcctctcctctactcacacagaaaaaaaagtgtcttttttggagctaagagctgtgcaatggggttaggggaatggtgatgccagtgctcctttgcccaaactgttgtctcagaatgctgcctgcatcccactccactgtctctgggtctagtatagtattaggactcacttaagagttggagtatttatggcctagactgtctttcaagtttacttggaaacagagatcgctgtagccctcagtggtaaggtttgtgggaactcaagtttggactgctgggattggtgatccccctctggctagagctggtttaaatgttccctctgttgtggcgcatcagctgagtttggacaggttttcctttctgctctaacaagacagcactgagttcactgcctcacaattgatgtgtactccctcactcagtgtccagagaggctctctgcaccatgaggctgctgccaggggtgtgggaggggtgttgtcagtgattcaggactgtttttctaactattcaatgcttctctcagcaatatgaaattaaaaccaggtactaggagtactcacttgatttttgcttcttatgaggattttttttttttcagcgtaattgttaaattggtgtcctcatgtgagcagggggatgatcaccttctattccgccatcttgcttccacttgatagttttacagtaaactttcaattcttatgagtttttttcttttctgattagatttatttccccagcacttaacagaaatttaaatttgaaataaaaatgttttatgcattacattttgaaaactaataaaattactattttaaaaattcaacctacacaatatcacctagtaaaataagtacaattaaaataataaattatatatttataaataagtaaaataattattattgagaaattttttaattaactacctagtaccctctctttaattttgtatcaatctaaattaattccagatagtaatgtatctccaaactttccttagaatttttttttttctggcatgctctaaatccagtactagtacatcactccataatatcaggccaattcaagtgaggggagatttttggctgacttattttatctgggtaatttattgcagtatgctttaaaaaaaacagcctacataaagtaatctaacatctactctatcatttatattctagtcttaattaataaataggagatgctatagttatctgatctcctttttgtcaccataaacatctatgttcaaaacaggtgccatggtatcaatgtatccctcaaagttcatgttcattgatcttcaatataacagagttgagaaggggacttttaagaggtgattaagtcagtggattaattttgttatctcaggagtgagttcattattatgagagtgagtttgttataaaagtgagtttggccatctcttgttctctctcactttcttgctcttccatcttctactgtgggtttatgcagtaagaaagtcctcaccagatgtggcccctcaattttcttggacttctcagcctctagaactggaagaaatgaatttcttttctttataaattaccctgtctgttgtatctgttataacaacacaaaattgactaagacaacagaccaaatagggcagaaaacaaacaatctgtaccttatgatcattctgtccatgaatgttgtgttgactctttgaccttttggaatacaaacccattcatctagctaaaccttcagcagttacatgctcctacctgttttatctaaacatgtttgaaatgtagcagggtagttcaacacttcaatggcacattctggttatctctgttccaccaatgtaaatctgttaccaagatgtttgttattcattttttatttttgtttctgctcttaatttcaaatccatctgttatgagttgaattgtgtttcctcttcctctaaaaaaaaagatctttaagtcctaaccccgcaatttctgtcaatgtgaccttccttggaagtaagatctttgcaaccaatcaagttaagatgaggtcattagaatgagtcctaatccaatatgaccatgtccttataataaagaaaaatttaaacacagaggcatgcagacttctagagtgggaagaggatgtgaagatgcagagacacagagagagaatgctatggaaagataaaagcagagagtaaagtgatgccagcaaacctccagaaactaggaaagaggtgtggaacagattatccctaacagccctcagaaagaaccaattctactgacaccttaatattggagttttagcctctgaaagtgtgacataataaatttctgttattttaagccactcagttttaggtaccttgttaccgcagccttaagaaactaatactccatcttttcccatgacagaaatatagcaaaaactatagtgtttctatcttgagaaattccattgtttctcaattaatcagtatgaagtaaatattcaactaattttaaaagaagagaaaaattatttccctatcagccaagtagctgggagcttagggacaatgttttatatagaaacaatttaatttaatgattccttggaaaggcattgtaacctgctacttgttaaaataagtcaataaggaaatttcccataaacttttttgagaaagcttgccctctacaaagaaagcattattggaacatgaactttaaaagtatatacacatgtgagcatgcacacatataattcaacaaaggcatgctcaattttgttatgttctaattcacaatgactacatgccttttcatcctaaataatttggtaattatttaaataacataggtcatttcttttacttctgcttcaaacttgaaggtgtcaatgaaaaaaaaatcctctacttagctttgccaatagcaacctgatctgatgccaaggcagagatgagactgtactttcatttcgtctaggttgcagtcttcagcctcgctaaataacataggtggtttctcatgcaaaagcacatgtaacattattttgaaatgcacacattcttctactttctatgaaaacacagtatttgctgtttaagactgtttaaggtcttcaatgcttttaagaactgagagctacatgagaaaataaagttgctgcaagattcatgttcacttcagtgggagttgcacaagtggaatgatggtcaggaatctgtcctaattagtaggcactcctgctttgctgcatcttagttatgccactgttaaattatactcagtaaattgaactatcttctagtctctgaagagattaatgttacatttggattgtgctgaatgccaaccattgatatttaacagagaaactttaagatatctttaagtagttttacaaatatatttcctatgatgaagttcattttttccttacacaagagaaaaagaaaaaggaattagaaatatttgttttaagattattatggaatatcacctaaagatgttaatgatatgttccctagaatattaataacttataaaaaggataaaatatttggataaggcttcaaaatgtcaccttcatgcagcaaactagtatttttcagaattatacttttttctgcccaagactgttttcatccaatctctctacaatttatccttgtgacattcctatcatgagatccgacgacggtcagatggaagaaactctagagactacatctccttaccttggctgcttcttccaaaagtacactcagaaataatttgttcctacacttgctcttatattggaataaattatcttaattaattgacaaaatgtaatgctagaatcaaaatcttcaagaatatatcagctaatcacattgaatgcaattaatatctttttagcctgaagggacttatagttgtcatacttttatcgtataatatgcaatacaaataatttgttaaaatcactttatcttcttctcattatggactccttggttcataaactatctttagatattttaaagaaactgtcttaagatatattatgaaaaatgctattttaaatgtcatatttagtatttcattaatgcatttgtttctaactgcaatcacaggaaacaaattattttgtttaagtaatacatacattatttaaaaagaagcatcaatacaattgtagcaattgaggacaagcaggctttaaataataccacatccggaaagacaatgtctttaagagattcgcaatgacattttcatatttctattgtatatattgacaggtagtttatagatcttccaaatagtttcaggaaagcattatgttgaaaaaattgtgtgtgtgtgtgtgtgtgtgtgtgtgtgtgtgtgaagttttatcacaggcacagagagaaaccccagtgctatcttaaagaaatgtgtctttcaccaaaagagcataaaactgcctttatgtattaagcgttggccacataatgacacaaaggccttctcagaccccacaaggagagctcttgacttctaggaagcttctttatcgaaacagttaagcattgaaaagaaactttaatggacttgatttgttttaagttaagaatctggtggtccatactataacagggaccatctttgtgcaggatagaggctaaataaaggccacacagctcttacttggctttcattaagaaaaattcaatcagttaaaataccttcctacttttctgtataagtcgtgcctatacccatttaaataatgccaggaaaacagaatgctaatctcctcatttatctaaaattataaaatattagtgtttcaaaagtaaacttataaatgaaaaaaacgaagaccagaaggaacatagttaaaaccacatactagttagtagcagaaccaagagctatatatcttgggcccctcaccaggaaaagctttagtaacacactgctttaactgcaaattttatttttttctttaaataattagaaactaaaactttttaaaataatgttgatagcttatattgtgttcagatactatcatcatatcaaagtcagaatgagatttaaactctgattattttcagtataatcttacaataaaagcactttttaatctgctcagtgagaatgtctgcattataatatctagttctcttacaaggtgaatagaggcatgatcacttatggaagtagtatatattatacacttcattgcttcaacttctaaggaattagaacagaaagaaaaatctgctcttggattagatagagaccaataaaaactaactggcttcttttggtacatttgatgactttaaatatttcctaatcttgaactcttttccacatagatattaaaaattttctgaaatacaattaattatgatgggtatattatctgggcaggtaaacaagtttttcattattaaaatactgggcctctgtgtttgcaatataaatgtggtgcataaaaagcttctcactgtctgcattgcatgttaacaatattccacatttaaattctcatttagcatcagaggtatatttttaaatgatattaaatcaatattcagtacctattatttgttcagtatgcatttagcactgtcttattctcaccagggattctatctccagatgatcataaatgttcattatcccggtctgtgaagtgagtttttgcataatgagtacctgtagacttttctctcttcgttcctccctcttcaatctattagcattgagacacgtgacttttagttttgtataaagcaaactgttgcgacggctagtggaacaacattgaatgttttatagcgtacaaacagaactcctcttttgttacgtaaacctaccttctctttatacattttttggttcctcttcagcttggtgcagtgtgaattttaaacagtaacagttttctttacatagaaggtctcccattactaaacatcctgcccctacataatagaggggctaaaacgatgtttagcaatctactcaagccatcaaagagtatgcattgcccaagggtatagattggctccttttagataacatgtctagggaaggttgctgcatggaggaccttacactggtaaatcgagtcaagacattattgttctggctgtaaaatagtacacatttgtaagtatttgcaagattacacatgctgggtctgagaatcaagctgaagggtcattattcagtttcatcatgactcagagctacttcaagatccagaaaacctttcaaatcagtaacttgaaaaaatgcattcaccatagtattagggctaagttacattacattttatttcaatgctgtgagaaatgaaagttatatgttgtatatacagcaacatttaattaacaagaaaacaaaattaaccaagaaactcaggctgctacaaatttattatcaactacagtttcttcatcttcaaaatattcctaatatactctttggtatttcccaatattccaaactatacaaaatctagaaaatttctctatttttgacacatgggaaattttaaaagataataaagtaccttccacccagaaaacacacaattgatacatgtcaactaagtaaaagacttattgaggtatagagcaagtcaatgttaaaattagaattaggtcacgcctgtaaccccagcactttgggaagccaaggcgagtggatcgtgaggtcaggaattcgagaccagcctggccaacgtggtgaaatctcttctctactaaaaatacaaaaaacattatctgggtgtggtgacgggtgcctgtaatcccaactactcaggaggctgaggcaggagaattgcttgaaacaagaaggtggaggttgcagtgagccgagatcacgacactgcgctccagcctgggcgaaagagcaaaactccgtctcaaaaataaattaaaataaaataaaattagaattaggtcttctttcaccttattgattaccttcaattcattaggtactatgttaagttctagggagaaaccaaaaggaataagatccatccactactctcaaaaagcagagaatctagtaaaggaaatgtgcacctggtgtacatatctcataattcactaattatacagcctttatcaaacatttactgttttctatattttaggtgctatactaggttccaggtatacaacaagaaattaaaatgcagtcactgcatagctgaatgcggaagaaaaccatagtaacagaaaaaaaataaatacacataatatacaacaaactgtcatgactagttactaaatggtaagtattggggatatgaactatgaaaaaaaatagaaatgttacctgtcctatggaatcagtctagtgacaatgtcagcgtttaaataatatttacaaaataattacaatagtgaggagtgttttaaaggaacagcgcaatatggtttgtgctatatttgatattagtataaggcagagtagtggcacaagttaagtggaactaacttcacctaaaaaactacttgaggggccgggcatggtggtttacccctgtaatcccaatactttgagaggtggagatgggaggtttgcttgagaccagcctgggaaacataggtaaacatcatctctaaaagaaatttttaaaaaattagctgggcatggtggtgtgcacccatggtcccagctactcgggaagcttaggtgtgggcggggggtgaggggtgtcgcttaaggccagtagtttgaggttacaataagttattatcacaccactgcactccatcctggaagacagagtgagaccctgtctcaaaacagagaaaaaaaaacaaaaacaaaaacaaaaagctacgtaagctggaccataaaggatatgtaggaatttgcaggatagaggagaaaaagagcattaaagaccagcatttacaaaggtcaaaataagctccttccagtttggaacagcccctcatatacccacaacctaataaaaaatttacaaagttttaatttgtttttcagaattattcttgtgatgtctagaggtttatcaactttcttaagttagacaaatgcagagtctagttacttcatctatcccaatacagtttactgtaattccaacagaaatatagtaaagggaacaaagaaattgttagccagtgatgaatcagaaaaggcactataaggaaagttcaaattgaagctaccatgaatgagtaggtagatatgtgtttactctacaggaagccaaggtgtaagaaatgttggagaacaaacttcatatgtacaaaaacagatatagcccaaacatttggaggcattgtgggaagaaaaaatggtgtctcatctaaaaatagctcgggatatgacccactaattgcaaaactaattgttgaatgtctagctgttgaggcattctgctagatttctcagactttggtcactgtccctgccctcaggaaatgtgcaaactagttgaaaagctaaagcaaaatacaaataatcatgctctaaggtagaatatgaaaatctcaaaaagagaagtacaaatgaaatatcctgagaagaaagaaataaaattaaatgaaaggaattgtaaaagaattcctaaaggaattagcattcaggttgaactttgagtactaagtaggatctcaacaggcagatatgtagggagggcattccagtcacaacagcaagattgaaagtatgaagatgatagtattcagataacagaatgttcaaataactcagtccaggtttgcttgagccttgggtatttacaagacagaaaactgaaaaggtaagtcaaaacaatattatagaagtcagaagagatttatctgataacactattttttaatgaaggaagtgatgcaatggagccaatacttagggaagattaatctaaaatagtttctatttaagacgcagcctgtctctctgaactcgtgatttgttaatcaataatagactacaactacatggaccatagattcactttggagtgataggaacagttgttctttagttaatgaaaactactactaacggaatgagatgttttgaataaaacagactgattttggtatttcctgccccactctcccagaagagacagtggcaaatgtctatctctaaaggcccactgggaagggacaatgcaaagtcatcccaaatggagagacgcacttggagaggtaggtggggaaagtagctgagcctgggtaggtgactgtgttttccgtggtctccaaatagctgagatacatggttttgagtctcaagagttgatggggaagagacgaaacttcaggtgagttccatctagagaacacatgagctagacctagtcccagccacaaaccttgtgcctgagcctgtcaaacaagaagcagtgctacagctcacaatggaatatgaaagctgggctaataagcacatcggcagggacatttgaaattctggattgcataaactaaggcctttttacaacctggggaggtaggacaggagacacaataataagtaatattaaatcttccccatggaatccataaaggggacttcaggtcagatttagtttggtttagaaaatgagagttgtttccagagtttatgataaggtaaaattaatacctgatacactagcagaagtttctggctttgatctagaaaatctgagttttaacagaaatcatcaagctctttaagaagccgcagcactactgttatttagctatgataggaaactacactggtatttgcatgctttgctgagtgcaatgatccctttttataaaacaacgagctttgataattctgttctcacaatggcaggtacctgtaacaaaacatctagctttctgacagaatagacacaggattctacccagttgacaggtttgggtttttttctgaatatatcaaaaggaagctatccttgactcatcctgcatgataagataaaacttttatttccattgaatttctacatattcccacccctgccactcctgcattcagtgaccactactaaaggaaagcacacacacacacacgtgcacacacacacacacacacattttagagaattcttctctttcatactttacttaatggggaaaattgccgccctagcatttcagtattggcaataagccaattattcacctcagtcctacagcatccctatgttccttggttaatgaaaattaccagcaagtctgtaactatgggcatgaattgaaaagtcttgggtcaacagttttagcacagtctagaaactactttctagtgccaaacgactagattagcctgagaaccatctatgggtcttcagtattctctgatgtataaaaaataataacttggttatacagagaatgtggtctctcttaacacttctctctctccaccctctatatgcctttttaaaaatctttcttttcatctttctgtccaccctaccaaagttccgagtcccaaatgcaaactcccgttccagattatatattcatcacagccagtgctcttcatagcctaatacaataaaatcaatgcaacaatgtcacttgtcagtctctttgtgcataagataaaatgatgccatctgtgagacaaagtaacatagggttatgagtcatctccaactcctgtaaaatagcctagtcagtctgggcctagggagaaaatgatgaagagagagcaatcagaaaatcagtgcactagtgattcatttgttaatttatagaaatgtgaagttcttttaagctgatatgggcagatcaactgacaaacctgctatgcgcatctgcacttttattatacttttattatacctgctaagcacacctgcatttttatgatagagtttgcctgaggccatcatagcagcaggaccgggaatacattagtaaaattagaagaaatatcatcaggcaacttcaggctgcatgtaaacaattaacagctcattaaggagaattttacttttgtgggagcctatccttcccttgaccaagtttaagctggctaataaatagaggcatccacaatgagggtcaggagtatctcaaattctgtgtccctgtttgactcaggattaactttaagcatacttattactctataatcatctattgaattatacacttttattatgacagtccaaccagaaaaaaaaacttaccttcctaaattcttttcacagtcccgcttctgtaatatccctatttgattctgaggtgtaagttaaatatactgaatgtatgcagacatattttagcctctggaaaaggttttaactgaaatgttagtgggaaatctaagaagcaaaagtgctgatgaagcaataaaatgggtacatattaaaagcaatgaaccctccccctcaaataagagattaaatggtgtataatttccaaactcttcaccacagtctcaatcaagtttagatttaccagcatcacaatctgcctaatacattcactgaagcactttgggatttatttgacagtttaaagctttcctcccaaattactaattaattggacttgagtctctaatgctaagtttgcttattttctaaatttttttaaaaaaaaaacaccttgatttacaaatctctaggtgaacttgaaatgcatactttgaaattgagcatatagttaaaaagaatggaatgtacaagatttcattgtataataaaatagtactatctgacatgcaggagtttagaacatataataattgaggtaaagaggtcttgtggtcctgcatccttgctgaaaaatgttggctttggatataattttaacctgtattgcactgtagtaggatttatttagtcattcagttaacatttattaaaacctcactgtgtgctaagcattgggctcctcagaggtacagggaggggttaaattggtttctgttctccaggagctcacattctacttggggagacagatgtgtaaatggctgatcacactgacaagggtcataaattatgtatgacttgagtgttgtgaggtcccaaaggaagaagcaacttcttgagggtgacaccactgaggtctctagtagtgactggcttgtatctctaggtatagtagagaatacacataatacacaaaatgacacataccatcttattctcttatagcatcctattcttttcctttggaacagttatatcaactgataattatgtgtgtgattaattcattaatgtctgtctttatgactagactatgaaaacctggaaggtagggactggtctgtttttgcttaccatccccggggcctattatgatgctggcacataatagatagtcagttattgtttggtgactattgaatgaaggaatatgtgttttcaagctatgggaagatatttattatgggaaacttcactacaatattattggctaccactttgcccttttaagaagcttattcttggattttcattcaaatagttcacccatccccaaacaggtagttatcctctgacgtaagcagacaaaactaacatgagcactaccacatgcacacctacaccacacaggttacacaacatatggtcgttacacaacgtatggtcattacacataggttatacaacaaaaatcacaccaagtcatgacatgcaacacagcttatcttttgggcactgtatgtcttagcacaacacatgtactttacccaccgcttatctcataagtacatgaacgtgtccttactcacactgtccccatgtcctcctttctctccttagcccttgtcactccccgcctgtgaaaataagtgaaggtttcatagaaaatgttatatttgctggagtcttggattgagcggactttattgaaatgaaaacttagataattttgatgttttcataaagagaaacttctgctctagaagcatccaaattcatagcaggagacatctgaccctagaaaatcacatcataatggaagcaaccatctcaaaataatatgcctaaaactttcatggggtgtttgtgaaactgaaatagtcactgaaactcaatataccccttgctttgcatggaaatgcataaaaattggccattatttgttaagaagaatatgggacaaagattaatcaaaatgtggtatagatatattcaaatggatgttgatggagtatctcaatgcctgtacttgacatgtaattgagctaaaaaaatctgaacattgttcccgaaatagccacatacaacacaactttttcatcttcttcatgtgtctaagacccagtgcatatatgacttcatccattaaaccctgcccaattacttagacctcaagtaatattcccttctctgaattcctgtaactcgcattgcctgtattacttattagacacttaatgtgtacagtactgtattattatctaacatttatgcatgttgaaaggccatcatccaagggattaaaaagaccaaaaccatgattttgcacaggatgaattcctgagaagactagagatatttaccttagagaagttttgaggatgggcaagaggtgatatgctaattatctttgactaatctgtgttcctatatgggtagcaaataggatggttctatagggctccaaaagataaaaccagggcctatggttaaaaactattgggatattattttcaacccagttcaaaaatgactttccagtagtcagatctgatttgacagagaatgggctaccgcctcaggagataatgaagtctctgctattaaaaatattcaattagagaagagttcaagagaaaacttaaggatcaaataagcaaaatgagatttagaaaccttttccactcagggattatctgatttttaatatgctttgccttctcaactactctataaatttcttaaagacccagactatcacatcactttccatccttggtacgtatttctttatctcaaacatagtagatgctcattaaacatttcttgatcaagacagaccctgatatcaatactgaaataaaactttaaatgtttgagacaatttttggaaagcagttaactacattaacaatataattaaaaatgcgctctgaatattccacaccatgaagtatcatgcaattattactaaccctaacagtatattaacaatagtattcatgatcagcaataaggcaatagcaattacattagtactgataatattagtgatatttacaatgattattaggccctgacaaattttagatggatacactataatcatacattgaataataacttcataccagtaaatcaatcagaaataaaatgaaactgaatgagttattaggtgtaagtgattatggaaaataaaaattgaaaattgtgacttagagtttgccagaaaatagaaccagtataagaaaagtttaacagaacttagaaataagttcaaaagagctaagaaaaataaggtcaactagtcagtctggacctaatgaatacgcagttgatgagatttcaaaaccaaccattgagggcgagatgtcaaaacatcaatgtagaaatcagacattcaacctcaactaagaaaaaagtacagttttaactaagaacaccttgacgtatgaagggtgcttgtgaactcaccctgtattgtataaaatatatcccaggaaatggaactcctgggaaataaaccaccaactcacaaagcctccttttcctgtctactgaatgtgtcattctagaataataatataaacagagggtgcatgagggaattttttgtgtgcatatacaggggattttgtgtggagctgtatatgtgtaaccaagaactgaaatatttgactaataaacctgttaaaatttattccaatagttttattggtaagcctaaaacaatctggttttcttcccaagaaccatgataaatccaaggactttcacaagattaacctaagttagaactggagtgttgttggaacttcaaggcagcttcaagtgacagctggagggagaatttcaatttttatcaaaataattgttttaaaagatgtgaggttataaccaggaaagtaagaaagcagtgaagtccaaaagggtgggtacttctaaccattgcaatgaggagaacaaaatgataccaaaaactggcaacgacataatccagccaagtgatactagcctgaagttgagaatgctgaaatattagtgtcccatttttcttctgtgtcagttcatggtccagggggatatccctgtagacaaagaagctcaaaagggccagatataagcaagcttgagatttcacattgtgacatatgttagctgtttcatttgacacttcttttccttaaagttattgtgtataccagaccatcaacctaatagcaataataaaatgagtaccatctattgagtttttcaatctatcagatgctttataaatataatttggtttttttttgaatcctcacaatttttaacctcattttacagatgatgaaatccaataattaaactaatcatacaaatgaagtaacatactaaagaacaattggctgggccaggttccttttgcctctgaagcctggagtggttctttccactccaatcttgcgaagtaaatattcagaatctgcattttaacacggttcccaggtggtttacatgcacattaaattggagaaactggatatcattctgctttcctgctgtttctctcatcagtcatacacaaacacaaacacacacactcacacactcacacttacacaaagagaatggggggtggggagagaaagtagtacaagtcattatctactttaaaagttagaaatatcgatacactttctctaacaacctctgcaaattttgaatacatctgttaatcaggctcattaaaataacatatatattttatcagctgttattagcattcagagtgtttactgaataaaataactttagataaaaatgaaacaccatattttacaacagtttatagaggagcataaaaagggagagaataaaggcatgagtcatacagaaaaacaggagtctgggtttgctgtggttcacactttgataataagtacaccagcaattacaaatgatttataaacggctgtggctatagaaaacccactgtctgtaataattgcaatccaagctttcatggagctattttccctgaaattgcagagagaatggtaccatgagaattcttcctgttttcataaattcaccatcaattttggttgccagcaaactttatttccaggtgctggacctttgcaatccaaattattgttattgaaaagaaaactgaatgagaaacaatctgcatttggtctaatttttcctccttaatacattttctaacataaactctcacttttctttatctatgcatctcaatgagtaggtaatttttaaattaagtagattggccctatttgaaaattctatttttatttcaatcttgagcatgctgaaatctgttgaatataatacctaatataggaattaaacaaatttagcatggatggttctcttttctaagactaatgccctatctcactgcttctccaaaatttttcttcatagttatcacctgagaaccttgtaaaaatgaacattcggattcagtaggtcttgggtgcatttctaacatcccaggtaatgtcaatgctgctggtccaagaacccactacactagcaaaggcactatacttaatttagcaacagtgaaatgtctaattttcagtccgctttttcacaaagcaaaactgagtcaccttttaaaataataaaagtaatacttagtcatgcattattatatacaacatgtaaaatcataaaagtaggaaaactaaacataatcttgccaaccagatataactattattaacatctggctgtatattcttccagtctttcttcaatgtacatacatctagttttacaaaatggatatcttgccattcattatcctttgatttaacaaccatatctagaccaccccaaatttttgcacagttttatatcaaacctccaaacctctcttcacagccatatgtatcacttagaaatgtgagtacaatactatcaaccacataattcaacaaagcaaactcaacagctttttatccaggtgttaatgcagaacagcaagaattctataaaaccttgaaaacggtgcagcataaatattaatagcataatgctgtcacagcttcatatgcactgggtatacacaggcagggcctcctctgctcaaaaatacacttcatttcttcagagtgttgcatttctttctaaacctgatctccagaggcatatttggggttattttagtcattctctcacattcactggggaccagcttccttagagaaacataagttttgttccgtttttatttttttctctctgcacggcttgctcgcctttcttgaccttttcttggcacgctgtagaccacagctgcttcaactgatggggcaagagtctgatgctctgctctgcccaggtgttccttttcattaacactgcatcaattcaggctgtcagacaggctgttatacccatgacaactaaacagttggtagaaaacaggtacaggtgggctaccagtcacttatacatgaatcgaaagggctactcttgtcactcatccttagtggcaaaatggtataatagaaatggattacgtgcaatattctgtgctatttagagatgcatgtgacaaactggaaaaatgaggatgcatactttaaaatttaaataaaagtactctgccaaaatgtaagcatgacaataaatgtgttttcttatgaaagccaggcatgatacaaaatcgttttttaaaaaataattttagctagggtagttaacacagtttgaaagattgagtaaaattatttggtgtcagaaatagaacaaactcctgtctggtaagctaataattttatgttagctatttctgggtatatcgtctctatgttagcacagcagttctcaaactttagtgtgtgtcagaatcaccaaaagaccttgctaaaacgaagattggcgggccccacccctagagtttttggttcagtagctctggagtggcatctgagaatgtggcatttctaagatcctaggtgatagtaatggtgctggaataataagaatgcttagagtcgtgcaataattcacactgctttagagaagcggttctcaaaccaaagttggcaaaagaataacttgagatgaaaagcttaataaaatgtagattctagtgtctcaacttctagcactttaataaacgattctgccacagatgggcctacatagtcaaccacattctgatgatattattaggttggtgcaaatgtaattgtggtttttgccattacttttaattattgtaaagagattgattttcacaactgaaagaacatcaaaatcacttaaactagagcttctcaaactttaaggcacatactaatcacctggaaatctgcttagactgtttcagtaggcctagggtgggacctaagattctgaattttcaacaaagtcccaggtgatactagaaagcctgttaataaactatagactgacaagtcccatcccagacatttttattcagtagaatgagaatatatttccaatttttaaaaatgcacccagaatacactcagtatatttaaattcttttggtcactccctgtaaccaaatattttgagattgatttttggagattcgatatagtaccagtaatattgtatgtttctgttgaaaaggcaaagcatctgaggcagatgagtggggatttttttgaaatgaaaaagacttgatgtgatagattgcattttccaaatgtctgcaacaataatccttatcccacatgcttttctacaacatagacttgatattcttcctattgagtggtaagttctatgtactctcctcttgaatctaagtgggcttttgacccccccatgtaattgacaggatgtcagagaagaaaagatgcatgacttcttgacttccaaggcaatgtcagaaaaagtgatgcagtctccatcttgttcttggaagactcctatctggagtcccaagccaccatagaagaatttgactacccagagtctgccacgctttgaggacaccaaaccacgtggagaggccaatcagtgaatctagataaaagatatataggaattcctaatactatgttgctcctgttggtagttctatgcttcagggccctccactttagggcaggacatgtgagtgaataagccttgaaataatcccagtctttgactatcaactcacacacagcctttgagtcttctttattgaggccctgaatattgtatagcagagagaagctatacaccctctgccctttcctacttcctgactcacagattccattaacataacaaaattcctattgtctgcatcactcagcttgaggtggtttgttactcagcaataacaacatgagccctaagacaatacaacttaataaaaccataaaattctccttaggaaacacatgagaaacttagacgtataaaccacttattttaggcccactgtaaagctgatgaaaagaaacgttatagctatagatctgcatgatataaatagctgacatgtatttgagtgttttttacatgccagatcctttatgtatgtatcaggggaaaaagtcaaaatgcctcttagagtattccggcagagggaaataagtttctactctctccccagtacttttccatttactaactattgccatgaaaattggctttctaaaaaaaaaatagatctatgaaaaggtaagcaataatttttaaaattacaatttttatataatttcacatcaaaagtttctaacataatattagaaacatatatgtactatttatccagattcactgattgcttatactttctatctttaaatacatatttttatatataaattatatgtaaattgtatatataaattatttatttatgtataagttacacataaaattatttataaataaattacattttacatatatatatatatcttcttaaactgtttaagagaaggttgaagtcatttggatatattgtacccctttattccaaatactttagtatttttttctgaaaataaaaacaaggagaggggccaagatgccctattagaagcagctacagtccatggcactcacggagaggaaaaaaaggggcgagcgaatacagcaccttgaactgaaatatccagattcttgcagtgggactgattagggaaacaatttgacccatgaagaacaaagaaaaacagggtggggtgacagcccacacagagccaagggacccccgacccccacccaaggaaagcagtgagtgattgtttgatcctgtaacaccatgcttcccccatggatctttccaacctgtgaatcagaagatcccctcgtgagctcatgccaccagaggcttgggtctgacacatagagctttgtggagccttggcagagcagcttctcaggcattcacagagacccaggagctttacatactctagccctgggaaccccaacaatcatgcctgcaactcaggcagggcaggaggtcttcacatacccctagggtagtgccagaatccagggaaccaagcagcatcattctgtgggccccatggcacctcacaagataagacccactggcctgaaattccagccggcaccagtaacacattggagccttccagagactggatggagcccccaggcagaggattgtgcaccatctctgctgtgtggttgactcagccattccagcctgtggtcttgggagagtccaaacttgggatgaggaagggtccccccagcagcgcagcacagtggctttgccagatcatggccagactgcttctttaaatgggaccctgatccattcttcctcactgagtgggacctcccagccaggctttccagcaatgccagcctgcatgcttaatggacagggctctgatttctctctaggaaggagtgcccaggagcagggagggccaccacctgggttggttggacgactcagccactgcagcctgtgggctttgaagagtctaagctgaccggggcagaagtggttccctactacaatacagatgttttgtcaaggcatggccagactgcttctttaagagggtccctaatcctattcctcctgactgggtgagacctcccaactggagtctaaatctacctcctacaggcacatgcaggccagcaataggtcaatgccttccctgggatggagcttccagaagaacgggcaggctgccaaacttgctgttttgcagccttcactggtgatatctccaggtacaggaaaagtcgaagcaactagggtctggaatggacctccagcaaaccacagcagccatacagaagactggccaaactgttaaaagaaaagcaaacagaaaacaacaacaacaacaaaaaccacaaaaaccccatccacaggtcggcaacctcgaagattgaaggtagataaacccataaagatgagcaagaatcgacacaaaaatgctgaaaattcaaaaagccagagtgctctttttccttcaagtgattgcaacacctctccagcaagggctcaaaactgggctgagactccaatggctaaaatgacagaagtaggcttcagaaagtgggtaataatggacttctgttagctaaataagcatgttgtaacccaatgccaagaagttaaaaatcatgataaaacaatacaggagctgaaagccaaaatagccagtttagagaggaacataaccaaactgctagagctgaaaaaaaaaaaaacactacaaaaacttcacaatgcagtcacaagttttaaaagaaaaatggttttttctttccatctttagtgcttccttcaggaagaaaaaaccattaccagccactacaaaaacacactgacatacacagaccagtgacactatgaagcaaccacataaacaagtctgcaaagaaacacctagaatcatgatgacaagatcaaatctacacataagaatactaaccttaaattgaaatgggctaaattgcccaattaaaaagacacagaatggcaactggacaaagaagaaagacccatttgtatgctgtcttccagagtcccatctcacatgtgaagacacacataggctagaaattaagggatgaagaaaatttaccaagaaaatggaaaaacagaaaaaagtaggcattgcaatcctagtttctgacaaaacagactttaaaccaacaaacatcaaaaaagacaaagaaggacattacataatggtaaagagttcaattcaacaaaaagagctaaatatcttaaatgtatatgcacccaatacaggagcacttagattcataaagcaagttcttagagaccttcaaagagacatagactcccatgcaataatagtggaatactttaacacatcactgacaatattagacagatcatcaagacagaaaattaactcagctctgtatcaagtgggcctgatagacatataccaacctctccaccccaaaacaacaaaatatacactcttctcattgccacatggcagttactttaaattggtcacgtaatttaaagtaaattactccttagcaaatgcaaaagaaccgaaactataacaaacaatctcagaccacagtgcaatcaaattaggacacaagattaagaaattcactcaaaaccacaaactacgtggaaactgaacaatccattcttgaatgactcttgagtgaataattatattaaggcagaaatcaagaagatcttttaaactaatgagaatgaagatacaatgtaacagaatctctgggatggacctaaagcagtgttaagaaggaagtttatagcactaaatgcctatatcaaaaaggtaggaagatctcaagttaaaaacctaacataacaactacaagaactagagaatcaagagcaaacaaaacacatagccagcagaagacaggaaataaccaagatgagagcagaaatgaaggagatagagacacaaaatccccttcaaaaaattaatgaatccaggagatgtttttctgaaaaaaaaataaaagagatagactgctagctagactaataaagaagaaaagagagaagattcaaataaagacagaaattatgagaggaatatcaccactggacccacagaaatacaaacaagcatcagagaatactataaacacttctacgtacattaactagaaaacctagaagaaatgaataaattcttccacacatatacccccccaagactgaaccaggaagaaattgaatccctaaatacaccaataatgagaactgaaattgaggcagtaaaaaataacctgccaacaaaaaagcccaggaccagacagattcacagctgaattctactagaggtacaaagaagagctggtaccatttccactgaatctattccaaaaaattgaaaaggaggtactcctacctaagtcattctatgagaccagcatcatcctgataccaaaatctggcagagacacacacaaaaaagaaaacttcaggctaatatttatgataaacatctatgcaaaaaccctcaacaaaatacttgcaaactgactccaacagcaaatcaaaaacctaatccatcatgatcaagtagacttcatccccaggatgcaagattggttcaacacatgcaggtcaataaatgtaatcaagcacataaacagaactaaagacaaaaccatgtgattatctcaatagatgcagaaaaggcatttgataaaattcaacattccttcatgataaaaaaaactctcaatgaactagatattgaaagaacatacctcaaaatataagaaccatatatgacaaacccacagccaatataatactgaatggggaaaagctggaagcattctccacgaaaactagcacaagacaaggatgccatctctcaccactcctattctacatagtattggaaattctggctcaaagaaaccactgctcaaataaatcagagatgacacaaacaaatggaaaaacattccatgctcttggataggaagaatcagtatcatgaaaatttccatactgctcaaaccaatttataaattaaatgctattaccattaaactaccattgaccttcttcatcgaattagaaaaaaaaaactattttaaaagtcatatggaaccaaaacagagcccgaatagccaagacaatccttagcaataagtacaaagctggaggcatcatgctactcaatttcaaactatattacaaggctacagtaactaacactgcatggcactggtaccaaaacagacatatagaccaatagaacagaacagagacctcagaaataacatcaaacatcaacaaccatctgatcttcaagaaacctggtaaaaatgagcaatgaggaaagtattcctgatatggtttgactgtatccccaacccaaatctcatcttgaattgtagctcccacaattcccatgtgttgtggaaggaacctagtcgagggtaattgaatcctgcaggcaggtctttcctgtgctgttctcatgatagtgaataagtctcatgagagctaatggtttttataagaggaagtttccctgcacaaattctctcttgcctgctgctatgtaagacaagactttgcttttcctttgccttccgccatgattgtgaggcctccccagccatgtggaactgtgagtctattaaacctctttccttcataaattatccagtctcaggtatttgttcatagcagtgtgaaaataaactaatgcaatttcctattaaataaatggtgctgagataactggttagccatatgcagaaaactgaaacagaaccccttccttacaccacaaacaaagatcaactcaatattgattaaagtcttaaatgtaaaacacaaaactataaaaaccataaaataaaacctaggcaataccattcaggacataggaacgggcaaacatttcatgatgaagacaccaaaagcaattgcaacagaagcaaaaattgacaaatgggatataattaaactaaagagcttctgcacagtgaaagaaactatcatcagagtaaacagacaacctaaagaatgagagaaaattttttcaatctacccatctgacaaaggtctaatatccagcatctacaaggaacttacataatggtaaagggatcaatgcaacaagaagagctaactatcctaaatatatatgcacccaatacaggagcacacagattcataaagcaagtccttagagacctacaaagagacttagactcccacacaataatagtgggagactttaacaccccactgtcaatattagacagataaacaagacagaaaattaataagcatatccaggacttgaactcagctctggaccaaggagacctaatagatatctatagaattcttgacctcaaataaagagaatatacattcttctcagcaccacacagcacttattctaacataaaccacataattggaagtaaatcactcctcagcaaatgcaaaaaactgaaatcataacagtctctcagaccccagtacaagcaaattagaattcaggattaagaaactcactgaaaaccgtacaactacatggaaagtggacaacctgctcctgaatgactactgggtaaataatgaaattaaggcagaaataaataagttctttgaaaccaatatgataggagaacaatgagaacaaagatgcaacataccagaatctctgggacacatctaaagagatgtttagagggaaatttatagtactaaatgcccacaggagaaagcaggaaagatctaaaatcaacaccctaacatcacaattaaaagaactagcaaagcaagagcaaaccaattcaaaagctagcagaagacaagaaataactaggatcagagcaaaactgaaggagatagagacaagaaaaacccttcaaaaatcaatgaatccaggagctgggtttttgaaaagatcaacaaaatagatagaccgctacccagactaataaagaagaaaagagagaagaatcaaatagacacaataaaaaatgataaaggggagatcaccactgatcccacagaaatacaaactaccatcagagaatactataaacacctctatgcaaataaactagaaaatctagaagaaatagatacattcctggacacatacaccctcccaagactaaaccaggaagaagtcaaatccctgaatagaccaataacaagttctgaaattgagacagtaattaatagcctaccaatcaaaaaaagcccaggaccatatggattcacagctgaattctaccagaggtacaaagagtagctggtagcattccttctgaaacttttccaaacaatagaaaaagagggactcctccctaactcattttatgaggccaacatcatgctgataccaaaacctggcaaagacacacacacacacacacacacacacacacacacacacacacacaaagaaaatttcaggcaaatatccctgataaacattgatgtgaaaatcctcaaaatactggcaaaccaaatccagcagcacatcaaaaagcttatccacaatgatcaagtcagcttcatccctgggatgcaaggctggttcaatatatgcaatcaataaatgtcatccatcacataaacagaaccaatgacaaaaaccacatgattttctcaataaatacagaaaaggacttcgataaaattcaacacctcttcacgctaaaaacactcaatgaactaggtattgatggaatgcatctcaaaataacaagagctatttatgacaaacccacagccaatatcatactgaatgggcaaaagctggaagcattccctttgaaaaccagcacaagacaaggataccctctgtcaccactcctattcaacatagtattggaagttctggccacagcaatcaggcaagaaaaaaaataaagggtattcaaataggaagagaggaagtcaaattgtctctgtttgcagatgacatgattgtatattgagaaaaccccattgtctcagcccaaaatctccttaagcagataagcaacttcagcaaaatctcagaacacaaaatcaatgtgtaaaaatcacaagcattcctattcaccaataatagaaaaacagagagccaaatcatgagtaaactcccattcacaattgctacaaggagaataaaatacctaggaatacaattaacaagggatgtgaagaaacttttcaaggagaactacaaaccacttctcaaggaaataagagaggacacaaacaaatggaaaaacattccatgctcatggatggaaaaaatcagtatcatgaaaatggccatactgctgaaagtaatttatggattcaatgctattcccatcaagctaccattgactttcttcacagaattaggaaaaactactttaaatttcatgtagaaccagaaagagcccatatggccaagacaatcctaagcaaaaagaacaaagctagaggcatcatgctacctaacttcaaactatactacaaggctacagtaaccaaaacagcatggtactggtaccaaaacagatatatagaccgatggaacagaacagagaactcagaaataacgccacacatctaaaaccatctgatctttgacaaacctgacaaaaacaagaaatggggaaaggattccctatttaataaatggtgttgggaaaactggctagccatatgaagaaaattgaaactgaaccccttccttacaccttataagaaaattaactcaagatggattaaagacttaaatgtaagacctaaaaccgtaacaaccctagaagaaaacctaggcaataccattcaggacataggcatggccaagacttcatgattaaaacaccaaaagcaatggcaataaaagccaaaattgacaaaagtgatctaaataaactaaagagtttctgcacagcaaaagaaactatcatcaaagtgaacaggcaacctatagaatgggagaaaaattttgcaatctatccatctgacaaagagctaatatccagaatctacaaggaacttaaacaagtttacaagaaaaaaacaaacaaccccatcaaaaagtgggcaaatgatatgaacatacacttctcaaaagaagacatttatgtggccaacaaacatatgaaaaaagctcatcatcactggtcattagagaaatgcatatcaaaaccacaatgagataccatctcacaccagttataatggagatcattaaaaagtcaggaaacaacagatgctggagaggatgtggagaaataggaatgcttttacactgttggtgggagggtaaattagttcaatcatcgtggaagacagtgtggtgattcctcaagtttctagaaccagaaataccatttgacccagcaatcccattacggagtatatacccaaagaattgtaaatcattctactatgaagacacatgcatatgtatgtttattgcagcactattcacagtagcaaagtcttggaaccaacccaaatgcccatcaatgatagactggataaagaaaatgtggcacatatacaccatggaatactatgcagccataaaagaggatgagttcatgttcttcgcagggatgtggatgaagctggaaaccaccattctcagcaaactaacacaggaacagaaaaccaaacaccgcatgttctccctcataagtgggagttgaacaatgagaacatatggacacagggaggggaacatcacacactggggccttttgtgggggtgagtggctaagggagcgatagcattaggagaaatacctaatgtagataacgggttgataggtgcagcaaaccaccatggcacatgtatacctatgtaacaaacctgcacattctccacatgtatcccacaacttaaatataataaaaaaattgacccctttatcattacatagtgaccatttttgtatcttcttatagatttgtcatgaaatctattttttcttatataagtatagtgactcctgcacgtttttgtttccattggcctcaagtatcttttctagccctttattttcaatctatgtgtgtctcagttaagcttttattgtcaaaattgtttcagaagcacttttactatataaatctttgttcctcaattttctcttcatgtgcctgtcaacatcataatcagtctttaattaatgagatgaataaaatgtttaactgtcatttatttatgatttgtatgagagtcatacttttaactttttaaacattatattttagtaggaatttttacatcaaaaactcatcacgtcctttaatcaaaactgctttaccttttactttttatgctttgtaatacttttttgctttattacattgttttgaactcttgtacaataaaatattctgtctttatattttttccagtactttttgaatgtgtttgggattggtgctgcatatgtttaagtgagatggaactgcacgatttgttttttaaaaatcttcttaacttgtccttttagtcaaaaacccaagctatccctgccttgcccccagatccttttctcacagaataatctaagagttttgagaaacagagaaatttatttctgtacattgcagagcaacagaaatctgggatttgttaccaggatcttgatagtgaatgtattagttcattttgtattgctataacagaataccacaaactgagtaatttataaaatatatatataaaaatctatatatatatatgaaatatatatatcttacaattctgaagctgggaagtccaatctcaaggggcttataactggtgaaggtcttcttactatgccatctgtagaataacaatacagcacttgtaagagagcaaaagaacaagagggggctgaacttgcttttataacaaggccactttcttgaaaattaatccactcctgcaataacccattcctgtaataacccaatcctaaaatagcattaatccattcaggggggcaaatctctcattacctaatcacttatttggcctcacctcccaacactgttgcattgggattaaatttgcaaaacataaactttatgggatatagtcaaaccatagcagtgagactcaaaaataacaataaaaatattcaggaaatagtgatatctaacttgcactagaccttttctcttttgggcaaaaattacccatcattcccccaaattttcccatgcattttggttatacacgacagtgttttgatggatttgtattgaagaataatgaagatattattttccatgcttagaatgatgtagacaacataacagttgcaggaagtaagatgacatcaggtatcaaaaaacatattgtaataataatttggaggtggtaggtatcaggagaacagaaattctttcacatacatccccacccccctccacacacacatatacacacagagagctactcttctcataaattctcgaaatattgcagagcctggtgatagtccaacaatatagaaaaatagaaggataaagtcaaattgcttcaatattaaaggaaagtgtgaatccagaaaagtggagaatgtgtagattttggggttatgcatatatcatctcatacagcctcaacattattatcttaaatttcatatattagaagtttaggctaacagaaatggttatcgaataggaaatgcaaatagccaaaagacatatgctcattctcactattaacaatgtgaatacaagttgagataccatgttatatttctcacgttcactaaattaaatgcaaaataccagatataagtgaggaggtggaagaagaggaccttgtttcttggaccataaattggtatagcctttaggagataagtttgaagatatctaatgtatttgaggatatgtataatctgagactctgcaagtctacttttaaagtgtacaacccagagaacagtcatacacgtgaagcattcttactgtagcttttttttgtaatacttaaagactgaaaaaatattctaatgtccatcagtagaagaatgatccaataaacagttacagtcatacaatgaaatatcataaaacaataagaaaagaatgaactagaactacatttgttacatggcaaaatctcaaaaccatagcatgttgaaaagtttcagaaggatatctgtgtgtgtacaacagaacatttatgtaaaatgcaaaaatgcaagactactaattaaatattttatgtgtacatatttattttaaatgtgtacttcatcaacaaatgaatgaataaagaaaatataccaatattccattggtatatatacacaatggagtactattcagccttaaacaaaagaaggaaatcctgccatttgtagcaacatagaaaaaccttgttccttggagcataaattgaagtgaaataagccataaattggagtgaaataggcataaattggagtgaattggggtaaaataagccaggtgcagaaaaacaaataccacatgatctcacatatatgtacaatctaatgaagttgaactcagaaatagaaagtaaaatagtggtcaccacaggctggggggtgggaaaattgagaaaatgttggtcaaaagaaacaaaattttagtttgacaaaagaaataagttcaagagacctattatccatcatggtaactacagtttataacaatatatagcatacttaaaaattgttttgaaagtagattttaagtttacccaccaccaaaatggtatattaggtaatgcctatgttaaatagcttgatttagccattccacaatgcatatatatgtatatatacacatatacacatatatatcaaaacatgctgtacatcatagatatatacaatttttatttgtcaattttaaaatacataaatgtgaggggacatcagcaagacagcaaaataggatgctatagaccctctttcccctagagagaccctgagttaacaacaatatagggaccagaataactgagaactctagagactagttaggaagctatggaacccaggttattgtaaaacccagaagggattccagtgaaaggggtagaaaaaatcattgcattttgtgcacctgtttctgtccctcaccctatgttacatagcacagagcaataaggagaaaatccctcatgtctgggctcctccctcaggagaaaaacaaaagagtgcataaaatgttctaacttcccttggggcttcctaaggaaaggtttttctgtcttgcctgatttggagtgctgatgggacagcagcagagtttggaagccactgaagaaaggggtaagcagtgcattagagctgcagttctacagttaaatgccaggagatccaagagattggaaagttctgagaggtcctggaacctccaaccaggctgactggtgaagatctttccctgcacaaagccaataccacaaagattaggagaggtggctttttttttttcttcaaaatgcccaaatcccaacaaaaaataacaaagcatataaagaaacaggtaaaagtggcccaatcaaaggaacaaaataaaactccagaaaccaacactaaagaaatgtgtaccaaggggctactcaaaaaaagaatttaaaataactgtcataaagatgctcaatgatccaaaagagaacagatagacaactaaatgaaattagaaaaatgattagtaaactgagaatatcaataaagagaaactctaagaaaggaccaaataaaaattctggtttaaaaatataataactaaactaaaaaattaaaagggttcaacagcagacataatcaagcagaatcaagtccagtaacttaaagacaatttatttgacatcattgagccaaagggcaaatgagaaaagagaatgaagaaaagcaaaatagcctaagagacttatgggacactatcaagctgggcaatatatgcattataggggcaacagagggagaagagagggggaaaaaaagaagcatagagcgtattaggagacatattgggataaaactcccaaatctgaaaaaagaaaaagattcaacaggttcaaaactgtgataaaaccaaagagaatcacatccagatactttataatcaaactgtcttaagtcaaagagggagaatcttgaaagcaacaagagaaaagtgatttgtaacatacaagggagccccaagcatggaggttttgtatgcaattgaagttaagttgttatcagtttaaaacagacaattacaaatatgaaaggttttatgtataccccatgataaccatggagaaaaaacctacagaagatacataaaagaaaaagaaaggagttaaagtatatcaataccaaaaaaaaaaaaaaagacgaagacagcaagcgaggaaaagagggacaaaaactccatgatagtgagaaaacattatgatattggcaataataagtccttagactcgctttagatttaaagacacacatacactgaaagtaagagaaacagataaatgagggtgtcacaactacaaatttggtaaaggatagtctcttcaacaaatagttttggaagaactgaatatatacttgcaaaggaataaaactggacccttaacataccccatacacaaaaatcaactcaaaattgattaaagatttaaatgtaaagcctgaaagtataaaactcccacaacaaaacataaggggaagtcttcatgacactggtcttggcaatgacttcttcgatatgaaataaagcacaggcaactaaaacaaaaatagatcagtgccatttcatcatgaaaaaaagcctctgaacaccaaagaaaacaatcaacagagtgaaaagacaacctacagaatggaaaaaaatgtttgaaaaccatgtatctgaaaagaagttaatatccaaagtatataaagaacacatataaataaatagcaaaaaaccaagtgaccttatttttaaaatatgggcaatggacttgaataaccatttctccaaaaagcgcctattggttgacaggtaaattaaaagataatcaacattactaataatcagggaaatgcaaatcaaaaccacaatgagttgtcacctcacacctgttaggatggtaacatgatttggctctgtgtccccacccgaatctcactttgaattgtaataatccacacgtgttaagggcgggaccaggtgaaggtaattggatcatgggggtggtttctcccatgatgttctcatgataatgagtgagtcttatgagatctgatggttttataagcatctggcatttcccctgcttgcactcactctgtcctgccaccctctgaacaaggtgcttgcttctcctttgccttccaccatgattgtaagtttcctcaggtatccccagcaatgtgaaattgagagtcaattaaacctctttccttcataagttacccagtctcaggtatttcttcatagcagtgtgagaatggactaatatggatggccattatttaaaaaattacaactattggcaaggatgtaattggtgaaaacataaaatgattcagtcactatggaaaacagtatggagtttcctcaaaaaattcagtaatcccacttctgggtatatatccaaaagtgttgaaatcaggatctcaaagagatacatgcaatcccatgttgactgctgtattatttacaatagccaagatatggaaattacttaaacattcatagatgcatgaatgaataaaaaatattgtatatacatacaatggaatactattcagctataaaaagaaggaaatcatactatatgaacctggaaaacattatgctaagtgaaaaaagccaatcacagaagaattaacactgtatacttccacttctatgaggtacctcaaaaagtcaacctcatagaaacaaagagtagtttggtggttgccacgcgctgaggagaggagcaattggggaatttctgttcaattagtataaagcttcaattatacaagacaaataagttttaggatcctgctgtactacactgtgcttatagttaacaatattacattatgcacttaaaaattctgataagagaacttaacatgcaatatacatttttatgacattaaacacacacacacacacacacacacacacacacacacacacacacctcaacaaagtccaggactaaatgacttcactggagaattttgtcaaacatttaaaagaaaagtccttccttcaggagctcttttagggcaggcctggtggtgacaaaatttctcagcatttgcttgtctgtaaagtattttatttctccttcacttatgaagcttagtttggctggatatgaaattctgggttgaaaattcttctctttaagaatgttgaatattggcccccactctcttctggcttgtagagtttctgccgagagatccgctgttactctgatgggcttccctttgtgggtaacccgacctttctctctggctgcccttaacattttttccttcatttcaactttggtgaatctgacaattatgtgtcttggagttgctcttctcgaggagtatctttttggcgttctctgtatttcctgaatctgaatgttggcctgccttgctagattggggaagttctcctgtaaactagttcaacccttgtggaagtcagtgtggcgattcctcagggatctagaactagaaataccatttgacccagccatcccattactgggtatatacccaaaggactataaatcatgctgctataaagacacatgcacacgtatgcttattgcggcactattcacaatagcaaacatttggaaccaacccaaatgtccaacaatgatagactggattaagaaattgtggcacatatacacatggaatactatgcagccataaaaaaatgatgagttcatgtcctttgtagggacatggatgaaattggaaatcatcattctcagtaaactatcgcaagaacaaaaaaccaaacactgtatattctcactcataggtgggaattgaacaatgagaacacatggacacaggaagaggaacatcacactctgaggactgttgtggggtgggggaggggggagggatagctttaggagatatacctaatgctaaatgacgtgttaatgggtgcagcacaccagcatggcacatgtatacatatgtaactaacctgcacattgtgcacatgtaccctaaaacttaaagtataataataataaaataaaaaaaaagaaaagttaacaccaatcctcccaaaactcttccaaaaagttgataagaagggaatactttcaaactcattctactaatccagtgttagccatgatacaaaagccagaaaaagatactacaagaaaagaaaacttttcagaccaatatccctgatgaagattgatgaaaaatattcaacaaagtattagaaaattgaattctacaatacttcaaaagcattatataccatgaccaagtaagattaattcctggaatgcaaagatgttgcaatatgcaaaaattaataaatgtaatacaccacgtttgcagaatgaaggacaaaaaccaaaaccacatggtcatctcaattgatgcagaacaaaagtattcgacaagattctacacccttaattaaaaaacttcataaaaaagaaatagaaaaaaaatgacttaaatataatactctttatgaaaagcccaaagatttttactttttttggataatactcgatgatgaagaccgaaagcttttcttccaagatgaggaacaaggcaaagatgactgctatcaaaacttctatgccacatagtcttggaagtcctagcatgaaaaattaggcaatgaaaataaacaaaagtcacccaaactggagaagagaaagtaaaattatctttgtgcacagatgacacgatctcatatgtagaaaatcttaaagattccacagaaagcctgaattcagcaaagttacagggtacaaaatcaacatacaaaaatcaattttgtttctatacactaacaatgaataatctgaaaagaaaattaataaaacaattccatttgtaataccatcaagaataaaatacttaggaataaacttaaccaaggtggtgaaagacatgtacactgaaaacaataagacattgatgaaattaaagaaatcaaagaaatggaaagacaaatccattctcatgaattggatcttattatttttcaaatgtgcataatacccaaaatgatctatagatttaacacaattcctgtcaaaatccaactgtcatttttccagaaaaagaaaaattcttcctaaaattcatatggaatctcaatagacttaaaataaccaaaacaatttttaaaaagaacaaaattgaagggctcacacttcctgatttcaaaacttattataaagccacaataatcaaaacagtgtggtactggtataaagacggacaaatagatgaataaaatagaacagagaccccataaaaaaaacccttgcatatacaatgagatgggatctggtgcattctgagtggtatggccatagtccatagtcctttttttttttttttttttttttttttttttttgaggtaaggccttactgtgttgcccaggctggtctcaaacttctaggctcaattgatactcctacttcagccttctgaatagctaggcttacaggaacacaacactgcagcagcttagatggtcaaatggtcttcaacaagggtgccaataccactcaatgggaaaagaacagtctcttccacaaatggttagaggaaacactttcagtcccatccagttaggaaaactgtatatctacatgcaaaagaatgaagttgaacacttatcttacagaatgtacaaaaattaactttaaaatggattaaagacataagcataagacctaaaactataaaattcctagaagaaaacaagggaaaagctgtatggcattggacttggtgatgatatcattgatatgacaccaaaagcatacacggcaaaagcaaaattaaactaataggactatataaaacttaaaatattttgtgcagcaatggacacaatcagccaggtgtggtagcacttgtctatagtcccaactactcgggaggctgaggcaaaaggctgaggcaggaagatcagcctgtagtgaattatgccaatcaagtgtccacactaagttcagcattaatctggtgaactcctgggagcagggtatcaccaggttacctaaaaaagagggaacttgcccaacttggaaatgaagcatgtcaaaactcccatcctgatcagtagtgggattgtgcctgcatatagccactgcactccaacctaggcaacacagcaagacctggtccattgcaaaataaacaaaaaagacacaatcaacaggtggaaaggcaacctacagaatgggagaataggataaattattcgtgaaccatatatccgattaggggttaatatccagaatatataaaaaaactcactcctacaacttaataaaaaagtcaaataacctgatttaaaacaggcaaaaaaacttgaataaatgtatctccaaagatgacatacaaatggccaacaagcatatgagaagatgctcaacatcagtaatcatcagaaaaatgcaaatcaaaaccacaatgagatattacctcacactgcttagaatagctattatcaaaaagacaaaagataccaagtgttgacaaggatgtggaaaaattggtatccttgttcactgttagtgggattgtaaaatgatgcaattgctatggtaaacagtatggagtttccccataaaatcataaatacaagtaccatatgatccagcaatccaacttctaggtatacactcaaaaaaattcaaagaagaatctcaaaaagatatttgcatacccatgtttatagcagcactattcatagtagctgagttagaagcagtccaaatgtccatcaagggatgaatagataaacaaaacatgatatatatctagaatagaatattactcagcctaagaaaggaaggaaattctgtcacatgatatatcatggatgaaccattagtatattatgctaggcgaaataagccattcacaaaaagacaaatactgtataattccacgtacatgaggtatttaaagtaatcaaatttatataaacaaaaagtagaatggtggttactggggctggggaaaaggcaaaaaggggagttgtttaatgggtgtagaatttcagacttgctagatgaaaaagtcatggagatctgttttatatcaatgtgaatatacttaatactactgaagtatacagttaaacatggttaattttgctaattttgttttttaccataataaaaaaaagtataaagtcctgcatgggatggatatattacaactccagggtagctttttcagtggaggataggaggtgaatgaaattagggcagggcaactttatttattataaataaatctgaatcaaataataaaaacgttaatattttcaaacatggatgaagagtacgtaagcatttactatattatatcctacagttttttgcttgaaatataactatgcaaacattcttttcaatcttgaaatttatgaaaatgtattgtccaagttttcacaaatagtaaaagaaagatttgaatttgtctgcctaattttaaattccttaaaagaaactcctattctgaactaatgattgactaaattactgagagcacctaaaaaggtagtctgatttttcttctctatttatctagtaacagcagcattttccaccatgcctccaacctagagagttgattaccagctaaatgaattatgtttgttggaaatcctcagtttccaaactaatttcttgccaattcctacttgcacacgatatatcatttttatctttgctctatacttactatttagctatctatttatgatatactaaatgcctagaagtttcccctatatttttcattcctcaaatatagatccctgcaaatctcaagcttaattgaatatgtacatagaatagtcaagttaggcaatcatgttgacataggaacatgcccaggagttgagagtgaaaaccactcttcatcttctgtgcactatatgctttgattccactgaatagtgatctacttgtaagtgctgattttgaggaatcatcattatttctagattttattgcttatcacttggcattggccatactattatgtcagatcatttatcaaccacactaaagttataaagttattgactacacagtttagttttggcttattttactaaatatttaataaattccttttttagagacaaaaattcaattcttcaaagtaatctatgtttattatgtaccaaataagagaattctatttggctccattgacttaaagaaatctaatgtaagtctttatctaatactaacagtgatctcattttccatggtccatatccagaaataatttttactgataaggaacattgggatttctgtgaaactaattctgtatctgtcattatcattaatttatttgtattgcctaagtttaattgtgtcaatattccctaaatgatttttattagaatttcacctaggtcctacactttccttattaaatatatatgtatgtttgtgtgtgtgtgtatatgtacatgtgcgtatatatatatgtgtgtgtgtgtgtgtgtatgcatatatatagaatgaagtccagataaaacagtgaattttattcccttatatcatttaatattttatatttttctcatcactacaataatattttatattttatatttttctcgtcactacaaataaaaattatttatgtatcaatgttctaatttattctaattatttattctatctattttctacttattttagaagataatctctcattttttatgattaaggtttcctggattgtttagtatgaatataatccctttctttgagatttagatgtactacacaagtgtatgttttctcaatcttaaaatgttttcaattttctagtgtatttatccaaatgcctcttatgttactatcatgcattaatttggaaaacttggtcactgatatgatataccttagcttagtgaaagagcttcattattattcaacaagtagaaaattttagtgtatttacattcttatgtttagttactgctatttctgtgtttagatgggactgttattgacacatattacattacatttcaaataaacattctttatatgtaaaagttatatcatacatgaaatgtaatatttttgcaaaattggacatccttcttcagaaacaaaaattgagttaaaggaaaagttaactttgaaaagctgtttaatactccaatgcaagcaaccaagaactaatcatttttacaattaaatatcttcaatatgtatttttatatgagtcactagggaagtagaagtgcatagcaacaaggagatcaatgggagtaaaaaggagaaaaagaaagggcagagaactttgttagaagtaaaaataaattaggtgtcgaattaaagcacttagatggaaaatgcacgttaaaaaaaaatcgtttgccttgacttattctagaagttaaggaagaagtaggttgtttagagttgtactacctaattatcttaatattcatttaagttcatctcctcactttgatataaggtttttaaaggatgatacaacagatataaggcgcccattccagaaacaagctattatctgcagtaggccccagtgtcttcagagccccataatactattctttgaccccgacaccagagtcaatccacaaaagtcaaattacaccacagatttcagggaaaagttataattatgttctgttatgccaacctggccgtgaaaaataactaaagtattgggaaggaaggcagaggtcaaaagtgagctgttaagagaacaaaattaggcatttactaaaaagctattcactaactctaaattaggagcgggaaccactgcaggcatgcatgtgtgcaacattcaataccttttttttttttttaatcaaatggactctgaaaaatttacccaattatctaaatcttggcattcatagagttttcccattggcctctagcaatgcaattttgttttgacgtgattcagcctggagaaaaatgtgttcccatgacactggtgttgattgcagctgtttgatgattgttacaagtgtatctcaatgttctctcacaaatgtatgtgatactgccagttctgcagctctagtgttcaacatacccggatggtgtttaaatgttcctccatctgacagagtggtgctgatgcaatctgttaaaaattgtgactactctgccaagtatttgacagatttctctgagaaacctccaggatatccatctagcctcaactgacatccaaggctgtcttgttgccagtgccttcatcaagtggcatggatttctgacaggacaatgatccatagcagatttcttctgactagagaagaaacccctcaaatagagataatcacggcattttgttaaattagactaactcaacaacataggaagagaatcaaggcaagagcataatttgaaaagaagctttagtgattctttccatatctgagacctagttattctaaaataaatgacactcaaaattcttaaacagaaaacaagtaaaccacataatgtttttgttttcagaacttactttgatatatgcatttaaaataaaatagatttccattcttatttcacaaaacctgattcagaaaaccccctttattactgtcggtttataaatgcacttctgtatacaattctgtgtgtatatccatgtaagtttcagatgtaagcctttttcaaacagatggttcttgctgttaaagtgtataaattatgaatttgacaaagcagagcatttaaaaacactactataggaaggaatcaaatctttagaaaattaacaaaaatgacatagaaataagccttttttcattaactgatcaatctaactattcagactccagtcactaaacaagaaccatgactgaaaacagagaagtctcttatctttgcttcctggctttatagcaaatcccatgtttttgagttttaattgttcatcaatgatatgtttccaaatttaatctacttcttggcagtagaatcagcaaaacatttgttccctttcttctggatacggctgcaatcaattggatgcacaaatggcataaaggatgctatagggaatatctgccccttcacgaaatgggatagatgtttggatgatggtagtttcaaaagaaacaaaactgaaagtcagagcaaaaaagttaatcaagccaacactcttcaagtatacaactgaaaatacatatttgtcccaattcttaatgatttaagtattcccacatattcataaactctgttaaaggacatgccaaagttaaagtcactggtaatataataaccatttgttaaatgggtaggtgagtaggaacacaaagaatgattatacattgtcatttatccattaaaagcatttacaaaatctgtaagccattaggatgatagctcagtactaatgctgagagaataattttgcttaaaattcagatatgtaggtttatgatagttcggacttactaactatcccaaatactatttttgtatcaaattccttatagtgataaaaaattatgaaaagtgagaatacaaaaaaaaacaataaaattagagatagttcccagaaaagtaattgtttagtacaattatagaaggaactccatagctacagttgaataacagcaacaaccagagatgaggaagtaattgtatatctaggtgtgaggaataaaacaatgaagtttctagataacaaacatatgaggttatcggcatgactttgggataggagagaatttcttaagtgggaatcataaatcattaactataagtagtaagaatgataattggattacagtataattaagaaattctattcaacaaaagacaccattaagagagtaaaaggcaaaccgagagtggaagagatatttgcaatataacaagaggctcattttcaagatatatcaaaacacttacaaataaaaaaagacaacccaacagaaaaacgggtaagaatcatgaacaggcacttttcaagatatgatattgaaatgaccaataaacattggaaaaggtgttcaaccttattggtcatcagggaaatgcaaatttataccacaaattcaagtcataacaaacccacttgctcagcaaaacttataatgactccaaaaagattccaagcattgctgcagaattttcatacactgctagcgagagtataaaaaacattttaaaatctagattggcattatctactacagttgaagatactgtgtattctgtggcccatcaattccactcatgcaccaaatacatgtattaggttggtgcaaacgtaattgcagttattgcaattagactattcttgattttcttgtatttttttgtaagtggttaatgccacttttaatggtgaaagccacagttacttttgtaccaacctaataaaataaagagtagcattgtttgaaatagctaaagatggaaaacaatccaaatgttcactaatagtaaaatggataaataacttgtggagtattcatgcaattgaatactattgagcaatgaaaataaactacagctatttgcaacaacatagatgagtcttataaacataatgtagaacaaaaaaaggagcaagacaaaaaagagcatatacaatatgataactttcatataaatttttttaagacagggtctcaccttgttgcccaggctggagtaccatggcgtggtcacagctcactgcaacctcgacctcccaggctcaagcaatcttctcacctctgcatcccaagtagctgggactacttgggatgcatgccatcccaaggtgcgtgccatcatgcccacctaatttattttatatatttttgtagagacaggggtcttactatgtaacccaggctggttttgaactcttgggctcaaatgatcttcccacctgaggctcccaaaatgctgagattacaggtatgagtttctgtgccctgcccatataaagtttaatatgggcaaatctaaactataaaattctagggagacatatattagtggcaagtctataaagaaaagcaaagaaataactatcagaaaaaccacaataacaattacttcttgcggggagggaaggggttataatcagattggggcacatagggattttctgtgtggctggcaatgttctatttcctgactttggtggtagttgcattgaaattcactttatgattcactcatctaacttcatttatgttttatggaattttaatatgtatatcatatttcacaataaaatgtgtttaaaaggtaaaaggcaattcagtaaaagttggaaaactgtgaagtttataaatatacttctacaagattattttcaattgtgttaatgttacgcaaatggtacttgttttggaaaaattgatagtggcatacatagattcagaaagcgggatctcaaactatttagcagaacagaagaagaaatgctttagaaaaccatgataaatgaccaaaaagtggctgtaacgatgatagactgatatcaaagatatatatgcagaattacaataacgttatttcatgaagtaaaatgcattttaatatcttttatatgaaatgtgattttaacagtcatgcctaaccaaattaataaattaaatgtatgtttaaaaaacctgatcaaagattaagaagccagcaagtggaattctatttttcacccatctctctagtctaatctgttcaaacttcactgaagtaaaagcctgctgctcttgtttcatttttaggccatcattgctcttatttttccttgcctggaaatcaccctttccctccctgacccccaactcctccttctccacctttttcaacttcaactgagacactgcatcctccacttactctacttacttattttagcctttgcttcatatttatatttacacatattttagcctttactttatatttagtgctgatctcacatcaccaagtaggttgttagatttattttatataatttactcataccatacagaagttcttctcaacccagtaacagttctgaaagaagtacctggggagttttatgtttgtttaaaatatagatcccacagaatgacacccagattttcttattcagaaggtctgtactggagctcaagaatcttcatttttgaaacagctcaccattgattctgatatgcagtcaagattgagaatggcaccatggttcctagcatgtgagtagactgaatcattatacaggaagctaaataaatgtttattactcgagtgatgaaacacagagtataatctgtagaagttttattccttaccaaatatagtttcatagaatgaatttatgtttcatcttaaagatgagcaaactaactcatggaaaggttaagtattttgtccaatgtcataaaaatagtgaactagtgtcaattatagagctataaaagattttcttaatcctgctcaaaggctctttctaccacactagatttttcaatgccaatggtggaattccaatgaaatacagtactacacaaaataattaattcaaaaatatactctaaaagttccatcacttatcaggcacatcaaatgttgctgcatttggttagaatggtctgtaaattaccatacctctgccatctattaaacatttttgctatgatctagtgagatttgcccttggaaaaaaatacttttttttttctagtcaagtgaagcagtgggagtggagaagccttggaaaatttaatgattaaaactgatgatagaatcctcctaaacttgttataaagaattagatacataatatattttgcaatgataccaaatgttccaatatttaatacagatttgataaaatttttaaaatattttttaaaaaacggtattttatactataagcctttccttcttgctgattactttttgaatagggaatttttatgtctctattcattatttctaattgctctgatatttttgcaatcatgttctatttcctatccaaaatattcattagtattaactagcacttctgatataaccattcttcaactgaagatgatgccacaacaatttagattatgatctaaagtaaattatcattttataaatggaatattcacctgtccttctttacctactctcctttaatttgcttattcctcacttctaattcattcctctcaatatcatcacctttaataaacacacccctcacctactttatgatgaccaacaaggtgatctcgtctttataatgccaagagagtgatgctagaatattatgagcataggccataatttcaaatattctgtgattactaacaaattaattggccgagtaaaaccaattaaaaataaatgcttaacttatatagacaaacacactcaaccatattttcattgcatacagaaattaaataagattttgatttaaaaacatttaatttgttagaaacccatgtgctaggaaattttaaaacacacatcatattatatttaagaagtcaggactggaatatttaaataaaagatttcctccagacttaactaggctctcaattcattaagcagcacatgttttacgaattgtaaaatcaagcaaattgattttatgttaagaataagcaataataggtagttgattaatatatgcaaagaagtaatcaaccagtatatacaaggtattatgctaagtactatgagggatacatagccacttgcctccaagtggctaaataattacgggaaaaaatgtataatgggatggatgctgctaagagatttttattattatgcagcctcctttatatctagagcactggttctcaaccagggccagttttaatactccggggacctttggcaatatttacagacacttttagatgtcacaactggagaatgggtgggcattgctatacaatggctatacaatagaatgttgttaaacattctataatgcacagagcagcctcaccaccaacaaacagttaacaagcacaaaatgtcaatagcgttaaagttgaaaaacccagatctagaggcggagacagaaaattactttgggatcaaattcttgttattaagggaaaactcagttgagctacctcctttagtcatataaatataaggccagtaggtacatcagtaggctgagtatgtcatgttgctacatctggaattgcctttggacctagtcaccaccatagaatgacatgctttgagaacaatgaggaaacacataggggaggctaaaagagatgttagcactagcaaacatgtgactgagcaagcgcatcactgcagtagtgtatattcaattggttggcaggaccaacgggttatgcagactgacaatatgtagacagtactaaaacagcaagactagtaaattttctagttctttatatctacagttaagtatcgcttaatgacagggatacattctgagagatgcatccctaggtgatgcagggacatcataaaaatgcattgctgggaaattttgtcattgtgcaaacgtcatagaaagtacttttacaaatctagatagtatagactactacacatctaggttatattgtatagcctgttgcccctgggctataaacctgtacagaatgtcacctactgaatactgtagccaactgtaacataatggtaagtatttatatgtctaaacatatctaaacatagaaaagaaaaagtaaaaatgcagtattaaaatcttatgggaccactgttgtatatgtggtctgttattgaccaaaacgtcattatgcagtgcaagactgtatttggctttcggaagcaggagtgctttgattagtcgatagtcttcatggatgaatcactggagaaagaggcttcttgaaggagataataaactttgtataaagacaggtgagcaattaagtataagaaagaaatgtatgggccaggcacggtggctcacgcctgtaatcccagcactttgggaagccgaggcaggcggatcatgaggtcaggagtttgaggccaccctggccaacatagtgaaaccctatctctactaaaaatacaaacaaattagccgtgcgtggtggtgggcgcctgtaatcccagctacttgggaggctgaggcagggagaatcgcttgaacctaggaggcggaggttgcagtgagccaagatcacgccactgcactccagcccgggcaacagtacgacactctgtctcaaaaaaaaaaaaaaatagaaataaagaagtgtatgaagcatactgtattggtgcaccaagctggcaaagcaagttatatgttgttgcaaatgttgttgttgattcattaagagacttggccattatacctattccccaccattctgtgagtgttggctgctaatagctcatagctacctctgttcttgagataattgcccttggctgacagaaactgtgccacctgggatgttatgcagtctgtctcactaggttattggcatagggtgcataacctcccaggggtacaaaaggtctgggacccttgtctcagagagagacaattctatgccgagatttatgctccagaacttttgaatcccaccctactccacccctcaagaccctctcctgaggatcaagtgaaagctagactttacctgagaccacatccttgctcgtttttttccccttccctatcctgcttccctttctttcttcaggtgtttcattaagagcttttgctcaataaattattttcatgccaaattcctgtttgagactctgcttttaggaaagctgatttacaacacacatgaaatcaagaaactaaaatagaatgtagaatatgacagtctgtagagaaagattcatgttctgatcaactcccacttatgagtgagacatggacacggggaggggaacatcacacaccggcgcctgtcagggggtggggggctaagggaggaatagcattaggagaaatacctaatgtagacaacgggttgatgggtgaagcaaaccaccatggaacgtatatacctatgtaacaaacctgcacgttctgtacatgtaccccagaacttaaagtataataataatgaaaaagtttttgcaggaaaggagaccaaccagccttgttgaggagctattgccagaacttactgtaaaatgcaaggacatccaagtggtacaaagggcgaatgaaagtggatgctctggagcaccagcctgatcccctttaagaactgaagcactaatttccccacctgctggaagtgctggtagctgatggccctcagctgaagaatgttgactcacacaagcttgtagcctctgcctgatggaaaccagcagccaacaggtggtcgaattgagggtataaaagccagcacctgccccctaatgcttgcctcaaagaaaggcaaccatggagggttatctcaattgcaggtttccctgagctatggactgaagcatccattgcaactccttcaccattctatttcttcctctgtgtaatcatgtttttttttcaatcctcacaagtgttattactgacagcaatttccaataaagtttctgcctacaaaaaaaatgattcatgttctgtcatccttatggagaccgggcttggggcccatgcaagacagacagttaaacatgagatactagcacaaagctgggaccctttaaaggccgcttcctcagagaataggtagactagacaaaccctacccaccaacagaaggagacaatgggaagcctgccctttgggtaacaaaaaagaatttctactagcaaatccaaacccctaggattctaccacacatgaatttagaatccaaattcatgttacctgcatggcccagggacttatcatctgagaaatcaacataacctttgtctggggtaatacacggcaggtaatgatacatggcagatgcaaatgcataaagctctctggggaatttttctcaaggtattcctacagaagaaaatgagtccaaataacaatgtgttcatatgataaagaataagagaaggagaagaaggaaattgcttgaccagctatccagtcttataaagctatacaagggacagaaaaatactatagaacaaaatggtatcatataaagcgacctgagaagtctggctcttgaccaaaaatccgatgtgtgattttttttttttttttttggcccaactatcggcaattagaggctttacctgacaggccttatgaggaaaaactgccctccctacaccagacttagagcacagccaatgcattgcagtctctgaaggaagctgcagtaaaggacccaactcagcctcccctatacccccttttcaggagcctctgccaaaacctctttattggggggaagggaggatttttttccactctcacttaattttcaatactttgccactcctagcccttttctcttgccctcccctcagttcttggtttcagaaagcaggagccttttgtttatggctcacttaacagtgagaggagccccatgtctgtgccgatccatctgaacctcgactagcactagcacactatcacaaggggaaaaatagaacagggtgctttctcgggtttaacctcttgcttatctagtcttgactgttaacttttgttttggcttaaggttttaatcagctactccaagacttaacaactcagctttctccaactcagctgaggtcctgacaagacctagataagtgtataacacctatcttggtatataactaaagttacattataactcagtgaggaaaggatgaattagtcattaaactatgctgtgacaattggttctccataggagaaatgagacaaagttagatccctacttcaagtgatgggctgggaaacgtttaacaaccagcttcctgggacaggattggaaaccttatttgtagcacttgccaatttctgtggtgtaaagactttcaccatgggtaatcaagctacctatgtgatgtcatggaatgcagagttgggaacagatgcatttaattatctctagcaagctgattctagtacaacactactgccctccacaatacacaaacataagctgcagatagagtgtatatttaaacatgaaaagaaaattttaaaacttatagaaataaacagataagtctatatcataagtggataaggaagaaattcatagtaagacaaaaataagtacaaacttctttcacactattaggacacattgataataataaaaatgtacttatgttttccgacttgaagtgttctatattattttagatcaccaagggaaacatagtatttatataatacgaatgaatgaagacagatttgtttgaatgcacagctttagcttcacacgtataacagataggtatgctgttgtttagaagatgatcttcaaaagtcaaaaagtttacagtgagaaacacctcactgtaaaagccttattcttgctgcattttattcaagctcatttctcactacattcacaagaactggaattcatgcccatcctgcagtcagtaaatgtctctcttaaatttcaatcaatggcagaagggtgtagaataagaaaaaaaaaatcagtttctgtaactaataagatgataatttttagtgtagagttataatattgtaaaaattatttcaataattagtatattttatacattaaaagtattattcattaaattcattttattatcacattaagtgactttaatacctaaatgatgaaatgcattaataatcagttatgaacataatcataataaataacactaacaactaaagtaaccaataaacattataagtcctatgaacaaaatagttgggttccaaacttccccaaaaagttcctccttttgctttacttactataagcaattgtacattatttaagtatatgattattagcacatataaagtatttcatggtaagccatctagtagtgtcaaaagtaagtgaaagaatggagaaaagtgttgagtttgctgtaaaaggaaataaaaaattataaataaggccacattttagatgcactgtcatttttagttctatttgattctatcctcacagttacatagagcagagccataattgagagaaaccactttatccttctcttcattcttgattgaagaagaaaatcattgaaacataaccaatatcctttgcaagttcacgagctaggacatttttctgccttccttttgcagactcatattaaatggatataaagggtcctgggtcagtctagagtttaccaccatggttcacaaacatgtctgtgcataaatatcttaggtacttatttaaaatatagactcctgggcctcacacaagttatactgatgtagtatatagtatctagagattggtatgttcagtacttgccgtcctccaaaattattctgatttagcccatctatagatagactagcatttcaaaattactcctagaatttcctgggaaatatttatgtgttttaggtaggggattaagggctggacatgtttatgtattcatctcaaaaagtgggagcaaaagaatatatggtagatatgtggttttcatgtataaactcaaaagtatctttgttgtaattgggcttatgggccaaagaacaaaattgaagattagtattcttatgggtttacaatattccatataccgttgtccaagtgaatgtcatgggcattccagccattcaaccatctaattatccactaggtattatctattttaccttataaataacctgttatgtctgtccatttttctttttgtttattgatacataatgttgtacctactttgaggatacatgtggtattttgatacatgcatagagtgtgtaatgatcaaaccagggtaatgaggacatccatcacactaaacattcacttctttatgttgggaatattttaattcctctcctctagcaattttgaactgtacaacaaattattgttaactacagtcattctattatattatcaaacactagatcttattccttccgtatatcagtatctctgtacactttaaccaatctctttaattcctttcatccactcaatccttcccagcctctggtgatcaccaatcaaatgtctacctccatgagatccacttttttagctcccacgtatgctttgagaacatgaggtatttgtctttcagagcctggcttatttcacataatacaacgacctaggttggaaagttttctgttattacatctttgaacaagctttctactcttcctcaactccctcttgaacactttttaatttgctcttttgtagttattccctatattgtgttggcattatttgtactttttcattctttttcttttttctcctctgactgtgtattttcaaatacaaagtctgtcttcaggcttactgattctttcttctgcttaattcactctactgttgaaaaccaccaatgtattcttcagttcagtatatgtatttcgcagctccaggatttccatttgatattttaaattattatttcaatctctttgttaaattcttctgataaatttgtgaattattcttctatgttgccttggagttcagagtttccttaggactgctatttcaaattcttgatctaagagttcatatatcaccatctcattaggtcatggtttcctgtttgctgtcatttccttttgatgtgtctattattttgcattaaaggattagttatttatgcgagtcttcattttctggcttgttttgatcttcctaggctgtgtttgtttgagatgttctttgcagttgcctattgaggtcccttaattcttgatcactgcctcctttttgtgctgtctgtgcaattgatcctgattgtcagtgagaaattcagttgcttctcctcaaaatagagaaaatgtctggaaaccagaggattttatagagtgcccattagtacttctatattcagtggctaaaattagttgaaaataactaaaagccaatgccagcaccaccactaagagctgagattcttcagaaacgaagccatgtcttaccataccagcaaataaccatggtcagcagaagatatccttcaaggcaaatgaatatgaaatgaagagtaaagaaagttctaaattccaactatgagttgcagaaatgaggactgcagtagacatattctcatccttgctttctttgtatatatttgtataatgaacaaatatcttttttaaaatgttgcctccctccttcccttattatatgaagacatattagtggtcactaatcttatagtctttaggctacaggatacctaaagtagcatatggctacactagaagaaaaattaatatcctccagagatagacacagtgacagataggactttgggtctccctttatttgcattaaagacagttgcaaaaggttaggtataatacatgtttgctattgttgcggaagtgtgtatatggattctatttgctgacgaagaggacttaatgaatgttttatgatgacttttggcaactgttatattaccttctatgttctcccctccactgtaagagctggaaacattggaactacattttccagattaccaagcctctatctttttacatatgcattttatattttaaaaatgagatgttttcacatataatttggacaaagagtggcaaaatccatcttcttcctctgatagtagtggtagacagaggtctgggcatcccagatatgagagttttttaaagtcatttctgtattctcctgctgtttactcttcttgggattaaagaagagctatgaagtctttcagaagattctttttatttcctaattccgtgtggtagcaactctaattctttgtgacagtgagcttgaaagctggtaacgtgacctgagacactcagtcctccacctttccaacaattttgtatatattaattatgtcaaaattttttgactacataatggcctgataaaaaacttggtcccaggaaaatcttttgtatccactacagttttccaatagttatataatgacaagacatagtctctgagtgtctcctttccttccactagacttgaatcaatactatgattttgtacattgtcttcttgggtcccaagttctttatcttcctctgttaagaaaactcatcaacctttcgggttaattcagggatagtaaacaggtagtattggcatttttaaaaagttaaaaataattcagaaacactgcactgagcataatactatttagttctaattttaaatgttttcaagttatcaggtaggaggtgaaaagttattgtggcatattatttattttgtctaacatcacatttctatttaatcatctaattttgtaattaaggttctctgtgatatagttatgcaattaatgatagttacagtatttaaaatattcgagtaaacctaactgtataactttacgtggaatctttagacctttattatactgatgcttacacttttatttaattgatcgttgccctatccagagtcctcttacttcaggtgtgagtactattgtgccttgtcaacagcatatacataatgcacagctatgaccttttcccttattttctttttcacataatttctatttcaggataaatattaatcatatcaggcaataagtttttaaagatgactatcctactctcaggaggattaaggcactgaatctttggcttttttccattatacaacctatctgggtctcaaagaactaaagtgacggtttatgattgttataccgactgtcccccagttggtcattttccacaaccatcctaatcaaacaaataataggccttatttttaattaaatgtacaaagttaaataaggaattcaaataatagcagctattatttactagcttctatttcaaataaaattctgtgttaagtgttttgtatacctttatgtttttcacaaaaggcctttgaagaagacataattatttataatttatatactaataaattcaggtaaaattatgttaaattactgtttaagtaattgggattagaatccagatccatcttaagtcaaatcactgccctttacaaaatatgatactatactgctttaaaaagtcaatttatagtattataagccatgctgatgaaatgaagacctaatataatcagtttcacaactgatttaaatgagactataaataacaattgtataactttacatgattttaaatactacattattagagtcaatattgtctagttttcagtatctaaatccatgaaaatatatagtgagagtcgcttacttatgtccgcttttcacacgtgaaatgaccacttgcatcagatatgaagtgattcttaataacgtttgaaaacattcttactaacatttgaaaatatttgctcaagacgcatatattcagctgcttatgtgccacttctacgttccttatctgttataaaacttataactatttgttactgttcaatctcacaaaatacagaactcaaaggatggaaagcaaaatccaggaaatggatacagctgtagatgtgctaacatagcaggtagagggctccagaaagagcaaatattttctattggggaggagagattctcactttaagacatggttgctcagagtgaggatcactgaggaaaaaagaaaaataaataaataataaaaataaataaaacatggttgcatgattcagaagcatttctagttttttgttcctctttttcctctaatttatccctccagtcacttgtggtaatagtgatgttgctttaatgatgtgtaaatggccccagagagcttccttatgaaatgacaatgaagtttttcttaaatctagacttcctttggcttcaggttttcccatatccaataatcagaataatcatcatttaccaacttcatgaggtacacaccttctgaatcagtcaggacttttactgttgtaagcaacagaaaacaattcaaattctttaaacaaacaaaaaataaattattggttcatgtaaaggaaagtctaaaggtaggatgagcctcagctgtgatttggtcagtgatgctctcagctctggcccttttggtgcgctgcctttgtcctcaggctggcttactttggtggtgagataactactgcaatttcaggcttcacaatgcatagcatgctttccagaacaacaacaacaaaaatactcttctgtcacagcattttaccctgattgagccaccttaggttacatgccctgaacaaagcattctagacagagggtagaaaaattgtgattgacttaaactgaagatgggatctgctttgctgaaagcagaaaaacttcatgaggaatgagtttgggtccagaaatctgtattctgagtcctgttttactgattcaaactgggtgtctttgtatttcctagtaatgcattcaaccatactcgagctgtctggtatgaaagtcaacctcatataggattctagttttatatatgtttaccttcttgattacattcctatccaggttgatttttcattgaaaatttccctcaaactatagaatgccatcatttgaggcaccaaacatccaatgacttcaatcaaaatcatcatagtcaaaactacaacaagatgacactctttctttttttactttcattcttgcttggcatctaacttctgttgtaatgacctttctcaaaaaccaaacatcctccaacacccaacagaaaaatcagtcatttttttttgtttttaggaataattgttttctggatcctttctgcaataacaatgaagaaaaaaggttttgattgcaaggtaatcacatatgttatggttgctttaaaaaggacatgaaagatagcttttgtgagagtccttcataaagatattgccttttctatttattttaaaataatactggttgtttataattgaattttagcatgatcagaatggtgtaaataaggtaatatgtatctctacccttctttttaactgcaatgttgtaatccatttaaaaattgggctacttcattttacagtatttaaaaagtgattgtagtataggcagaagatcatctaatataaattcaacactccagtttagggatatagaatgactaatttgtgtcatataaggggccttaaagaataactagtcatgatgaaaataaacaagaaggataagtaaataagagcattattatgcagacatttatgaaccattaagcataatcatagctaaggaaatagctttctgtttgctagagataaccactctgaactaggatacataatactttcaatgactaatacaagaatatttatattacaagcagagtgaaatgcaatatctatgtacaatatgatatgagaagcaaataataacaatgtcttttactaatggacttctgattaatcaaaaaagatgattgaataataatctttaaagatatattctaaggatacacatttcaaaagtatattttataaaatgtgttttttcattgaaaaatctcaacgtttacagactgtcaccatttcatgcaccaaatacccaatgacttcaatcagaatcatcatagtcaaaactgtagtaggatgactctcattcttttttttcttgacattaaatttaatgactatcaactcaaaggcaataaataatcatactgtatgtagctacaaaatatagacaatatgtaaagatatactaattttgaaattattttgcatatttattatgtctatataaaatgtgcaaatatgtttaaaatgcaacactaaatataaccatgaatggatttatttttgagaacaacaatgatcttagtagcactatcctttaagagaataacatgctaaaagaactatatccagatttaaaaatataacaatcataataactttacattactttgttttttaaaaagtaatgagctatttctagacagtaaagagtttttcatagtatttattaattaaaatttttcccaccaaaggcatcctgaataattttatttaatgggaatttaaccaagtaaatgatgacaaaatataactcattcagaaatggaattattatttaagttcacaagaagtacataatgatcatttccactcttatctcctagtcatccaaacaaatgagagtccatttaaaggtggtcaccttgttaatctggtgtcagagaaaattttttcctgaaaaaaattctgctttgggcagaatgctgtacattgacacaaataaaacattttaattgatgaaactgactatgttttaacactacagttttacttggtaaatatgtaacctctcaagagaaatagtctgaggtttttaaggatacttttagtttactgcatctttcaaaatatttgtactaaaacctaaacattaacctgacacgtcagaatacttacaagaacttgtgatatgagacaatgacggaaaatagatgtcttaaataaagaggaacttttaaacttaatcattagttcaacggtatttctggagtacttgatagatgccaagctgtattaatgatacagaactatcatcatcgtcatcatgatcatcatcatagctaacatttatcgtgtctttatatatacaagtactctgctgtaggttttgttgttgttattatgtctggttttttcttatttcatttaatcttttattttctcccctatctgtataaaagataatacttagattattaataggttttactattattatagaaaattcagaaataacttgttcacagctatatagtaattgctgaagcctttatttaaatccaggaaatgttattccaaagcatgatatttgaactactaaactacagttgcttattaccaagaatcctacaatctatatgggagacagtacatacacacacccgcttgcttgaatttaaggttttttttttctatcctataatactcctactcaagcagttgctgatacctagaatatatatctcaaagctgtctacttctctgtgtctccaccaccatcatcctgaccaaacgatctctatctgatctactgacatagacttataactagtgtccttgtttctacctgtgtctttttagcccaaaagtcagcatcttatttaatgagaaaacactagagtcattccaactaaaatacaaaataatgcaaagatgttgatatggtttggctgtgtccccatccaaatctcatcttgaattgtagttcccatgatccccatgtgtcatgggagggccctggtagcaagtaattgaatcatggagatgccaacccgcatgctgcacttctcatgatagtgagtgagctctcagaagatctgatggttttatgagggacttttccccctttttgctctgtacttctctctcctgctgccatatgaaggacatgttttcttccccttctgccaagattgtaagtttcctgaggcctccccagccatgcagaactgtgagccaattaaaactcttttctatataaattacccagtctcgggtatgtatttattagtagggtgagaagagactaatacaaatgctcactatctcctctattcttcagtattggacagagatatcactcaatgcaattagaaaagataaattaattaaaggtagtgagaactacaagaataaaaactatgatatgatagtatatctgaaaaaaaattagagattcaaaactaaaagtaacaaaataattcagtaaggtagcaagatgtaaaatcattatacagaagtcaataggctttacaaataaaaacaataatagctagaaaatgtaatggtataaaaatccccatttacaggaaaaacaaaaatatgaaacacctaagaataggattaatagaaaatgtggaaagcctatatgaggaaatttttaaaatactcttgaaagatataatgaaatacctcaaacaaagagataaagattcctttttcttggataggttgactctatatgataaaacgtcagttctctctataagttcctttatatatttagaacaatcccaatacaaatatcagcaatttttttcgtggatccaaacatgttgatactaaagtttatatggaaaaacaaaatcaaaatatcaacagtaaacactgaaaatagaaacttacaaggtaagatcagcctaccatacattaagtcatatcatagatttctattattaaacccgtacagtattcatgcatgaatagaccaacaatccagtgcaatagaatagggtgtccagaaatagaccaaagtacacatggaaatttagtatataataatgtaggcatctcaaatcactgggataaagatagacttttttttaatggtgtgggaacaaccagtcagccattttagaagaagacaaaaagtctatttccgaataacaaattccgaatggatcaggggtttaaatataaaaaataaaactatacaggtactagaataaaatctgaatatagggaaaaaatgtccacctatgactcaaatccagactgaataaaagaaaagatcaataaatttgttaatacaaaaattttaaagccatcaaaaagctccaggcccagaatcaaaggataactcacaaactaggagaaaattttcaacatatatcacaattaaagggctaatagctctacctttataacaactcctaaaagttgaagaaaaaatccaaaaatccaattgaaaatgggcaaaagtcatgaatagacaagtcactatatctatatctataactatctctctctctctctctctatatatatatatacatatatacatacatcccttaaacatatgaacagaagttcaaccttattcatcattacagaaatgcaaattataagtacattgttatattatacttcacctacgtgactggcaaaaattataaattacaacaatacattttaccggtgaactgtaggaaaaccatcattctcatatattgtgggtgggaatgcaaactcatccaacatctatggaagggaactcagtaatgtctaatgagcgctacatatgcatttatcttctgatccagcaacccaacatctagaactttaccctgaagatataattccggaaacaggaaaatgcatatgcataaggttcttccttgcagtgttgtatgcaactgtaaaatattggaaacaatctaaatggctatacctagaaaactatggcagagccacataatagaatattatgtaaagtgcaaaggtatgctagtttttgcttaaggaaaagggggaaataaaacaatgtatatctactcagttacaccaaaggaaacataagaaggacaaatcggaaacaaatgagatttgttacctctagatagtgcatgagaatgaagtggaaagggtgggagagtgagaatgggatagaagataacacttctctcccatgtagttttgcttacagctctgaaatcatatcaacatttcacatatttagaaagtaaaaccaatcaggatggggaaaataaaaacaaaaggaaatataaacaaacagaataaaagagaacttactggtatttcaaataaataacatcctcagactgaaggggagcaaaaaaaaaaataacccaattaacctattaacatagtattttggctatacacctctgggctgtagacacacacacacacacacacacacacacacacacacacacacacacacactggacactaagttaaaagggttgttgtttttcccagtgctatgggttaacaattctcaaactgtgtgtgtgtgtgtgtgtgtgtgtgtgtgtatcttgtgtgtgtatcttgtaggattgagcaacaagtggaatgtattgcagagaaatggagatagatttgttacttttggagaagtgagttacaaatctggaaagagtggaggttagaatgagttttgtggttttatatcagaattggagacaacagtatgaactcatggtttttcagatagataggtaggcacatatgcatatatgtgtgtgcgcgcacacacacacacacacacacacactttctaggtctatcaggaggacctaaagcaatggcaccccagaagcaatgagtacctagtgtccaaatgttggtctctaaatattagtttccaagacttcttaatgcaggacgatttgagcattaaataaataatgacaacaaggattaataacccatagattaaaataagaatacttatatacaaaaatgaataaatggatgagtagggaaagctgttattgaaatagtaaatgacaattagtaagtgcaaaaggaattatagatttataaaattactaatagcatttgtctccacctttggaagtaataattcagacaagaatcatcaatggattataaatctagtgggtgcatgtttaatgaaaaccagcatattaaatcatcttaaagtatctctccaaaatattgattacaaaaactatagcaacttcagaattgggaaacttgcctgataccgtcatatccaagttaccaaggttaacatcatttctaatggtgccatctgataggatgcattgaaacacataataacacttctctggtatccccgccaaagatgcataaaccgaatataatcatgaggaaacaacaaacacacccaaactgagagacaaaatgactggctaacattctttttttttttttttttttgaggtatgttttattttattttatttttttttgcattgtgggtttatttatttatttatttacttatttatttatttattttattgatcattcttgggtgtttctcacagagggggatttggcagggtcataggacaatagtagagggaaggtcagcagataaacaagtgaacaaaggtctctggttttcctaggcggaggaccctgcggccttccgcagtgtttgtgtccctgggtacttgagattagggagtggtgatgattcttaacgagcatgctgccttcaagcttctgtttaacaaagcacctcttacaccgcccttaatccatttaaccctgagtggacacagcacatgtttcagagagcacagggttgggggtaaggtcacagatcaacaggatcccaaggccgaagaatttttcttagtacagaacaaaatgaaaagtttcccatgtctacttctttctagacagacacggcaaccatccgatttctcaatcttttccccacattcccccctttctattccacaaaaccgccattgtcatcatggcccgttctcaatgagctgttgggtacacctcccagacggggtggcggccgggcagaggggctcctcacttcctagtaggggcggccgggcagaggcgcccctcacctcccggacggggcggctggccgggcggggggctgacccccccacctccctcccagacggggtggctggccgggcgtggggctgaccccccaacctctctcccggatggggcggctggccgggcagaggggctcctcacttcccagtaggggcggctgggcagagatgcccctcacctcccggacgggacggctggctgggcagggggctgacccccccacctccctcccggacggggtggctggccgggcggggggctgacccccccacctccctcccggactgggtggctgccgggcggagacgctcctcacttcccagacggggtggttgctgggcggaggggctcctcacttctcagacggggtggctgccaggcagaggggctcctcacttctcagatggggaggttgccaggcagagggtctcctcacttctcagacggggtggccaaaaatatcaagatgatggaaaacctgggacaaaatgtcttcaccatgactgaagaacactttttgagtaaagagaactagagagacaattaaatgcaatgtgtgatgctggattggtgtttttttttttctgctgctgtaaatatcattggcgaaattttaataaggtgtaaagattagacaccagcattgtatcagcatttatttcctgattttggcaattctactgtggttatttaagtgaatgtctttctttttaagaaataaacactgtagtatttaggagtcagaggggatcctgtccatttatcatcaaacaaattttaaaaagacagtacgtatctacagagagaatgatcaagtaaaatttggtattatgttaacattcaaaaaatttgggtgaatgactattcagacatctttggtactattctcacaacttttctgtgaatataaaatatttaaaagttgaaagttaaaaagaaaaatatattgtatttaaaatggagtaatagataaaaatggcaaaatgttgatatttgatgacagctgatagcttcatgtgtatcattagattgttcccttttgtgtatatttgaagttttcaataataaaatattataaaagcctataattaattggattcagaagtctcaactaactaaagtatggaaaaacatgtagaacttttttttccagaaacggatacctacttttctctgcagcatctactgccttttgggtactgggggataatttattctaatttcataacttctcagacatttttattattaaacgactctaatttcaggttaatgtttaataactttaggtattatcatctatcatcattacttcaacttcctcttccttcctcaggtctctctacaactgcattagtcatccgatcagggatgttgaaagcatgtaacctgtttttcctcatctctctcttcctcctcattcctcccctattctttgtccaccttgcaagcaatggctgtggagaaggtatataattgcttaggagattatctgtatccagtgatcacataagctatttcaaaatacaattaagacttgtgggaatttgttgtcaatttttaattttttgggtacatagtaggtgtatgtatttacggagtgcatgagaaattttgatatgggcctgcaatttgaaacaatcatgtcatggagaatggggtatctgtctcctcaagcacttatcacacattgagttacaaacaatccaattaaattcttttagttatttttaaatgtataattaagttgtttttgactatagtcaccctgttgtgctatcaaatagtaggtgttactcaattcttctggcttttatttgtacccattaaccatctccacctgtcccccagtcctctaataagcttcccagcctctggtaatcatctttctactctatctccatgagttcaattgttttgatttttagatcccacagataagtgagaacaaggaatgtttgtcttgctgtggctggcttatttcacttaacataatgacctccatttccatccatgttattgcaagggaatgggtctcattctccattgtgtatatgtaccacattttccttatccataaaaaacagaaatacagatatctctttgatatactgatttcctttctttggggtatatacctagtggtaggattactggatcatatggtagctcaattttttgcttttttgagaacccccaaactgttctccatagtgattgtactaatttacactcccacctacagtgtatgagcattcctctttctccacatcctcaccagcatttgttattgcctgtcttttggatataagtaattttaattggggtgagatgatatctcattgtcgttttgatttgcatttctctgatgataaatgatgttgagcacattttcatatgcttgtcacttgtatgtcttcttttgagaaatatctattcaaatcttttgcccatttttcgataagattagattttttgcaatagaattgtttgagctccttatatattctggtaataaatcccttgtcagatgggtagggtgcaaacattttctcccattctgaggggttgccttttcacttggttgatgtttcctttgctgtgcagaagcattttaacttgctgtcatcccattagtgcatttttgctttggtttcctgtgtcggtagggtactgctcaagaaatctttacccagaccaatgtcctggaaaatttccccaaagttttattgtagcagtttcatagtttgaggtctgagatttaagtctttaaccagtttgatttaatttttgtatatgccaagagataggggtctagtttcattcttctgcatatggatatccagttttccctgcaccatttattgaagagattgtcttttccccagtgtatgttctcggcacttttgtcaaaagtgagtttactatgagtgtgtgaatttgtttttgggttctctattctgttccattggtgtatgtgtctgcttttacaccagtaccatgctattttgcttactatggctctgcactataatttgaagtcaggtgatgtgattcctccagttttgcccttttggcttaggatagctttgtctcttctaggcattctgtggctccgtataaattttaggactgttttttctatttctgtgaagaacggcattggtatcttgatagggattgtattgaatctgcagattgctttggatagtatggacattttgacaatatttattcttccaatccatgaacatgaaatgtttttccattatttggtgtcctcttcaatttctttcaacagtgttttatagttttcattatagagatttttcacttctttggttaagttaatttctaggtatttaattttatgtgtggctattgtaaatcataatttttatttctttttcacattgcacaccattggcatatacaaatgctactgattttgcgtgtttgttttgtatcctacaactttaatgaattttttagttctaacagtttttttgtagagtctttaggttttttttcaaacataagattatatatatcatctgaaaacaaagataatttgacttcttccattccaatctgaacacagtttatttctttctcttgtctgattgttttagctgggacttgcagtactatgttgaataacagtgatgacagcgggcatccttgtcatgttccagatcttagagggaaggatttccagggatatttcttccatttagtataatattagctgtaggtctctcatctacagcttttattattttcaagtatggtcgttctatacccagttttttaagggtttttatcagaatgggatactgaattttatttatttatttttctttttattattattattatactttaaattttagggtacatgtgcacaatgtgcaggttagttacatatgtatacatgtgccatgctggtgtgctgcacccattaactcgtcatttagcattaggtatatctcctaatgctatccctccccccctccccccgcccccaccccacaacagtccccagagtgtgatgttcctcttcctgtgtccatgtgttctcattgttcaattcccatctatgagtgagaatgtgtggtgtttggtattttgtccttgagatagtttactgagaatgatgatttccaatttcatccatgtccctacaaaggacatgaactcatcattttttatggctgcatagtattccatggtgtatatgtgccacattttcttaatccagtctgtcattgttggacatttgggttggttccaagtctttgctattgtgaatagtgccacaataaacatacgtgtgcatgtgtctttatagcagcatgatttatagtcctttgggtatatacccagtaatgggatggctgggtcaaatggtatttctagttctagatccctgaggaatcgccacactgacttccacaagggttgaactagtttaccgtcccaccaacagtgtaaaagtgttcctatttctccacatcctctccagcacctgttgtttcctgactttttaatgattgcaattctaactggtgtgagatggtatctcattgtggttttgatttgcatttctctgatggccagtgatgatgagcattttttcatgtgtcttttgcctgcataaatgtcttcttttcagaagtgtctgttcatgtcatttgcccactttttgatcgggttgtttgtttttttttgtaaatttgtttgagttcattgtagattctggatattagccctttgtcagatgagtaggttgcaaaaattttctcccattttgtaggttgcctgttcattctgatggtagtttcttttgctgtgcagaagctctttagtttaattagatcccatttgtcaattttggcttttgttgcccttgcttttggtgttttagacatgaagtccttgcccatgcctatgtcctgaatgatattgcctaggttttcttctagggtttttatggttttaggtcgaacgtttaagtctttaatccatcttgaattaatttttgtataaggtgtaaggaagggatccagtttcagctttctacctatggctagccagttttcccagcaccatttattaaatagggaatcctttccccatttcttgtttttctcaggtttgtcaaagatcagatggttgtagatattcggtgttatttctgagggctctgttctgttccattgatctatatctctgttttggtaccagtaccatgctgttttggttactgtagccttgtagtatagtttgaagtcaggtagcgtgatgcctccggctttgttcttttggcttagtattgacttggtgatgcaggctcttttttggttccatatgaactttaaagtagttttttccaattctgtgaagaaagccattggtagcttgatggggatggcattgaatctataaattaccttgggcagtatggccattttcacgatattgattcttcctacccatgagcatggaaggttcttccatttgtttgtattctcttttatttcattgagcagtggtttgtagttctccttgaagaggtccttcacgtcccttgtaagttggattcctaggtattttactctctttgaagcaattgtgaatgggagttcactcatgatttggctctctgtttgtctgttattggtgtataagaatgcttctgatttttatacattgattttgtatcctgagactttgctgaagttgcctgtcagcttaaggagattttgtgctgagacaatggggttttctagatatacaatcatgtcgtctacaaacagggacaatttgacttcctcttttcctaattgaataccctttatttccttctgcctaattgccctgggcagaacttccaagactatgttgaataggagtggtgagagagggcatccctgtcttgtgccagttttcaaagggaatgcttccagtttttgcccattcagtatgatattggctgtgggtttgtcatagatagctcttattattttgagatacagcccatcaatacctaatttattgagagttttcagcatgaagggttgttgaattttgtcaaaggccttttctgcatctattgagataatcatgtggttttttgtctttggttctgtttatatgctggattacatttattgatttgcatatattgaaccagccttgcatcccaaggatgaagcccacttgatcatggtggataagctttttgatgtgctgctggattcggtttgccagtattttattgaggatttttgcatcaatgttcatcaaggatattggtctaaaattctcttttttggttgtgtctctgccaggctttggtatcacgatgatgctggcctcataaaatgagttagggaggattccctctttttctattgattggaatagtttcagaaggaatggtaccagcttctccttgtacctctggtagaattctgctgtgaatccatctggtcctggactctttttggttggtaagctattgattattgccacaatttcagagcctgttattggtctattcagagattcaacttcttcctggtttagtcttgggagagtgtatgtgttgaggaatttatccatttcttctagattttctagtttatttgcatagaggtgtttgtagtattctctgatggtagtttgtatttctgtggaatcggtggtgatatcccctttatcattttttattgcatctatttgattcttctctctttttttctttattagtcttactagtggtctatcaattttgttgatcctttcaaaaaaccagctcctggattcattaattttttgaagggtttttttgtctctatttccttcagttctgctctgattttagttatttcttttttttttttttttctttattttttttttcttttttttttttttattatactctcagttttagggtacatgtgcacattgtgcaggttagttacatatgtatacatgtgccatgctggtgcgctgcacccactaatgtgtcatctagcattaggtatatctcccaatgctatccctcccccctcccccgaccccaccacagtccccagagtgtgatattccccttcctgtgtccatgtgatctcattgttcaattcccacctatgagtgagaatatgcggtgtttggttttttgttcttgcgatagtttactgagaatgatggtttccaatttcatccatgtccctacaaaggatatgaactcatcattttttatggctgcatagtattccatggtgtatatgtgccacattttcttaatccagactatcattgttggacatttgggttggttccaagtctttgctattgtgaatagtgccgcaataagcatacgtgtgcatgtgtctttatagcagcatgatttatagtcctttgggtatatacccagtaatgggatggctgggtcaaatggtatttctagttctagatccctgaggaatcgccacactgacttccacaatggttgaactagtttacagtcccaccaacagtgtaaaagtgttcctatttctccacatcctctccagcacctgttgtttcctgactttttaatgattgccattctaactggtgtgagatgatatctcatagtggttttgatttgcatttctctgatggccagtgatgatgagcattttttcatgtgttttttggctgcataaatgtcttcttttgagaagtgtctgttcatgtccttcgcccactttttgatggggttgtttgtttttttcttgtaaatttgtttgagttcattgtagattctggatattagccctttgtcagatgagtaggttgcaaaaattttctcccatgttgtaggttgcctgttcactctgatggtagtttcttttgctgtgcagaagctctttagtttaattagatcccatttgtcaattttggtttttgttgccattgcttttggtgttttggacatgaagtccttgcccacgcctatgtcctgaatggtaatgcctaggttttcttctagggtttttatggttttaggtctaacatttaagtctttaatccatcttgaattgatttttgtataaggtgtaaggaagggatccagtttcagctttctacatatggctagccagttttcccagcaccatttattaaatagggaatcctttccccattgcttgtttttctcaggtttgtcaaagatcagatagttgtagatatgcggcattatttctgagggctctgttctgttccattgatctatatctctgttttggtaccagtaccatgctgttttggttactgtagccttgtagtatagtttgaagtcaggtagtgtgatgcctccagctttgttcttttggcttaggattgacttggcaatgcgggctcttttttggttccatatgaactttaaagtagttttttccaattctgtgaagaaagtcattggtagcttgatggggatggcattgaatctgtaaattaccttgggcagtatggccattttcacgatattgattcttcctacccatgagcatggaatgttcttccatttgtttgtgtcctcttttatttccttgagcagtggtttgtagttctccttgaagaggtccttcacatcccttgtaagttggattcctaagtattttattctctttgaagcaattgtgaatgggagttcacccatgatttggctctctgtttgtctgttgttggtgtataagaatgcttgtgatttttgtacattgattttgtatcctgagactttgctgaagttgcttatcagcttaaggagattttgggctgagatgatggggttttctagataaacaatcatgtcgtctgcaaacagggacaatttgacttcctcttttcctaattgaataccctttatttccttctcctgcctgattgccctggccagaacttccaacactatgttgaataggagcggtgagagagggcatccctgtcttgtgccagttttcaaagggaatgcttccagtttttgcccattcagtatgatattggctgtgggtttgtcatagatagctcttattattttgagatacgtcccatcaatacctaatttattgagagtttttagcatgaagggttgttgaattttgtcaaaggctttttctgcatctattgagataatcatgtggtttttgtctttggctctgtttatatgctggattacatttattgatttgcgtatattgaaccagccttgcatcccagggatgaagcccacttgatcatggtggataagctttttgatgtgctgctggattcggtttgccagtattttattgaggatttttgcatcaatgttcatcaaggatattggtctaaaattctcttttttggttgtgtctctgcccggctttggtatcagaatgatgctggcctcataaaatgagttagggaggattccctctttttctattgattggaatagtttcagaaggaatggtaccagttcctccttgtacctctggtagaattcggctgtgaatccatctggtcctggactctttttggttggtaaactattgattattgccacaatttcagagcctgttattggactattcagagattcaacttcttcctggtttagtcttgggagagtgtatgtgtcgaggaatgtacccatttcttctagattttctagtttatttgcgtagaggtgtttgtagtattctctgatggtagtttgtatttctgtgggatcggtggtgatatcccctttatcattttttattgtgtctatttgattcttctctctttttttctttattagtcttgctagcggtctatcaattttgttgatcctttcaaaaaaccagctcctggattcattgattttttgaagggttttttgtgtctctatttccttcagttctgctctgattttagttatttcttgccttctgctagcttttgaatgtgtttgctcttgcttttctagttcttttaattgtgatgttagggtgtcaattttggatctttcctgctttctgttgtggtcatttagtgctataaatttccctctacacactgctttgaatgtgtcccagagattctggtatgttgtgtctttgttctcgttggtttcaaagaacatctttatttctgccttcatttcgttatgtacccagtagtcattcaggagcaggttgttcagtttccatgtagttgagcggctttgagtgagattcttaatcctgagttctagtttgattgcactgtggtctgagagatagtttgttataatttctgttcttttacatttgctgaggagagctttacttccaactatgtggtcaattttggaataggtgtggtgtggtgctgaaaaaaatgtatattctgttgatttggggtggagagttctgtagatgtctattaggtctgcttggtgcagagctgagttcaattcctgggtatccttgttgactttctgtctcgttgatctgtctaatgttgacagtggggtgttaaagtctctcattattaatgtgtgggagtctaagtctctttgtaggtcactgaggacttgctttatgaatctgggtgctcctgtattgggtgcataaatatttaggatagttagctcctcttgttgaattgatccctttaccattatgtaatggccttctttgtctcttttgatcttcgttggtttgaagtctgttttatcagagactaggattgcaacccctgccttttgttgttttccatttgcttggtagatcttcctccatccttttattttgagcctatgtgtgtctctgcacgtgagatgggtttcctgaatacagcacactgatgggtcttgactctttatccaacttgccagtctgtgtcttttaattgcagaatttagtccatttatatttaaagttaatattgttatgtgtgaatttgatcctgtcattatgatgttagctggtgattttgctcattagttgatgcagtttcttcctagtctcgatggtctttacattttggcatgattttgcagcggctggtaccggttgttcctttccatgtttagtgattccttcaggagctcttttagggcaggcctggtggtgacaaaatctctcagcatttgcttgtctataaagtattttttttctccttcacttatgaagcttagtttggctggatatgaaattctgggttgaaaattcttttctttaagaatgttgaatattggcccccactctcttctggcttgtagggtttctgccgagagatccgctgttagtctgatgggctttcctttgagggtaacccgacctttctctctggctgcccttaacattttttccttcatttcaactttggtgaatctgacaattatgtgtcttggagttgctcttctcgaggagtatctttgtggcgttctctgtatttcctgaatctgaacgttggcctgccttgctagattggggaagttctcctggataatatcctgcagagtgttttccaacttggttccattctccacatcactttcaggtacaccaatcagacgtagatttggtcttttcacatagtcccatatttcttggaggctttgctcatttctttttattcttttttctctaaacttcccttctcgcttcatttcattcatttcatcttccattgctgataccctttcttccagttgatcgcatcggctcctgaggcttctgcattcttcacgtagttctcgagccttggttttcagctccatcagctcctttaagcacttctctgtattggttattctagttatacattcttctaaatttttttcaaagttttcaacttctttgcctttggtttgaatgtcctcccgtagctcagagtaatttgatcgtctgaagccttcttctctcagctcgtcaaaatcattctccatccagctttgttctgttgctagtgaggaactgcgttcctttggaggaggagaggcgctctgcattttagagtttccagtttttctgttctgttttttccccatctttgtggttttatctacttttggtctttgatgatggtgatgtacagatgggttttcggtgtagatgtcctttctggttgttagttttccttctaacagacaggaccctcagctgcaggtctgttggaataccctgccgtgtgaggtgtcagtgtgcccctgctggggggtgcctcccagttaggctgctcgggggtcaggggtcagggacccacttgaggaggcagtctgcccgttctcagatctccagctgcgtgctgggagaaccactgctctcttcaaagctgtcagacagggacacttaagtctgcagaggttactgctgtctttttgtttgtctgtgccctgcccccagaggtggagcctacagaggcaggcaggcctccttgagctgtggtgggctccacccagttcgagcttcccggctgctttgtttacctaagcaagcctgggcaatggcgggcgcccctcccccagcctcgttgccgccttgcagtttgatctcagactgctgtgctagcaatcagcgagattccgtgggcgtaggaccctccgagccaggtgtgggatatagtctcgtggtgcgccgtttcttaagccggtctgaaaagcgcaatattcgggtgggagtgacccgattttccaggtacgtccgtcacccctttctttgactcggaaagggaactccctgaccccttgcgcttcccaggtgaggcaatgcctcgccctgcttcggcttgcgcacggtgcgcacacacactggcctgcgcccactgtctggcactccctattgagatgaacccggtacctcagatggaaatgcagaaatcacctgtcttctgcgtcgctcacgctgggagctgtagaccggagctgttcctattcggccatcttggctcctcctctccctgattttagttatttcttgccttctgctagcttttgaatgtttgctcttgcttttctagttcttttaattgtgatgttagggtgtcaattttggatctttcctgctttctgttgtggtcatttagtgctataaatttccctctacacactgctttgaatgtgtcccagagattctggtatgttgtgtctttgttctcgttggtttcaaagaacatctttatttctgccttcatttccttatgtacccagtagtcattcaggagcaggttgttcagtttccatgtagtttagcggtttttagtgagtcttaatcctgagttctagtttgattgcactgtggtctgagagacagtttgttataatttgtggtcttttacatttgctgaggagagctttacttccaagtatgtggtcaattttggaataggtgtggtgtggtgctgaaaaaaatgtatattctattgatttggggtggagagttctgtagatgtctattaggtctgcttggtgcagagctgagttcaattcctgggtatccttgttaactttctgtctcattggtctgtctaatgttgacagtggggtgttaaagtttcccattattattgtgtgggagtctaagtctctttgtaggtcactcaggacttgctttatgaatctgggtgctcctgtattgggtgcatatatatttaggatagttagctctttttgttgaattgatccctttaccattatgtaatggcctcctttgtctcttttgatctttgttggtttaaagtctgttttatcagagactaggattgcaagaattttattaaatgatttccagcatcaattaaaataatcacgttttttattcttcattcaattgatatgatacaccacattgattgatatgagtattttgaaccacgcttgcattacagtgataaatctcacttgttcataatgaatgacctttctaatgtattgttgaatttggtttgttagtatttggttgaagatatttgcctcaatattcatcagaattattggcctttttctttttcttatgtgtctttctgtgtttttggtatcagggtaatattggccttgtagaatgagtttgaaattattccttccccctgtattttttgaaatagtttgagtagcattgatattagttcttcttcatatgttgggtagaattcagcagtgaagccagtgggtcccaggcttttctttactgggagacattttgctacggctttgatctcatttgttggtattggtttgttcaggttttggacttcttcctggttcaatctgtgtaggttgtatgtgtctgggaatttgtccatttcttccaaattatctaatttattggcctatagttgctcatagtagccagtaaagatcttttgaatttctacagtatcagttgtaatgtcttctttttcatttctgagtttatttatttttatcttctcactttctttcttagttagtgtagctaaaggtttttcaattttgtttaacatttcaacaaaacaactttttgtttcattgatctttgtaatatttccattttatttatttcttctctgatctttatcatttattttcttctactaattctggatttggtttgctcttgcttttctagttctttaagatgcatcattagagtgtatatttgaagtttttcctcttttttaatataggcacttacagctgtaaacttccatatcagtactgcttttgcagtatcccataggttttcgtatgttgtgtttccattattatttgtttcaaaaatgtttttcaatttctttcttaatttcttccctaacccactggctaatcagttcattcacgtcattcagacatattgtttaatttccatgtgtttgtgtagatttcaaaattcttcctgttattaatttctagttttattccattgtgctcagaaaagatacttgatattctttcaattttttgaacattttaaaactagctttgtgacctaacatatggtttgaccttgagaatgatccatgtgctgaggaaaagaatgtgtattctgcagctctttgatgaaatgctctgtaaatatctattagatccatttggtctacagtgcagattaagtccaatgtttctttgttgattttctgtgtggaaggtctttcccatgctgaaagtggagtgttgaagcctccaggtctgattgtattggtgcctatctctctaactctaataatatttgctttatatatctgggttctcccatgttgggcgcatatatatttaaattgttgcatcctcttgcagaattgactcctttatcattatatagtgaccttgtttgtctcttcttatagtttttgtcttgaaatctattttgcctaggtattgctactaagacttgttaaaattaaaaacacagaagacaatgtaaatggtataacccttaacaatgtaaaaataatcatttaaataacaaattaggtaagaggaggcaagcttacaggtagacaagagaagtggcctaagattaaacctcattgagttttttaaaacgaaataaagaaaaacttcaaaatctcaggttcccccaaacttcttatgcaaaagggaggatgattgcaacactctcttccaaatgtatggctgttactaacattatgcatcagtcagattgccatggaaaggtaaaagacctcaggcatctgggatcaggcttccttgatcattcataagtaagttattggctggcctctcagaaacaaagacatgctaattttaagtttagatctaagtgtagctcttaaaactaaagtctgttccattccacactgacaatgtcattacggttttgtcttcccaggtaatagaacaaagtcaggactcattcctctgcctaccagagacgtctgcataattgactttctttactccccttttcttatcagacattcactttaacttacggaaaatgtagatttagtgggcactaactaaagtctcacaagaatgtaagtatttacctaactggctacctgtccctctttctacatgccgcccctcgtccccttaatgaaatgtataaatactaaacctcctgaaaaacctcttcgggaaaacagccacagatacatctgtggctcatgtttttcccagttgtgccctaaaagtcgcttaataaaccttgatgattaagaattaagcttcagtcactcattttgtttgtcaaagacaaaacccaatgaaatcgtctttgcaaaaattcaaatagtgagaaaattatgacagtgaaagagaactgacctaaccaactccatcttgcctttaaccctaaactgcccttgttcattgctgttcttggactgaggtaactatagaaagaatttagttttcactttaactttgaaacaaagatgacaacagcccttttctgaaataaactgccttcttgcctggggacaaaacgacctttgtaagacttacaaattagccacaagattagaaattatggtttaggagttatacaaccagaggccatgagattctgaaccaccccagttgctcctagtgataacatcactatggtaaaacctaagattggtgttcgagatattttccagaccctgcattctgatgcatcacctggtgccacccagaccggtaatgtggttaagctagttatgcgattctaccaaggaacagaagccagcaagatgaaccagctctgacctcctatgatgtcacctctgacctgaccaatcaggtcactgaggtcctcactgcctaaccccttctcagtctttaaaaaactcagtctctgaattttcggacagactgatttgagcagtagaactcctcttatttagacacctctgcatgcattaaactctttctctattccaattcccctgtcttgataaattggctctgtttgggctgcgggcaagatgaatctgtcaggtagttacaccaatttaaaggctttcaaaatcatttctcttaaatttaaagtatgttttaaatactaatctcatttgcaataaagaaaaatttatcttaagtaaatcaatttcttcagctgcattaatgttcctctttgtcaaaatcaagcaaaagaagcttaaaatttttaaaattaaaattatatatagagtttatttgcatactatagcttataaactacttatggtttgtttatgtatatataaatattataaatatatatataaatacatttttggaaaaacatatatttccatttatctatccatcaatccattcacccattcttttatccatttatatctagatttacttttatttgcttttctatctgtatatttacatagatgagatgtatgactgaaatatttctcaccaactattaatgatagttatttctagatgatattctgtgcaaaatgtttacattttcctcttcatactcttctgtattgattgaatgtttaaattctacccatatatcattttcaaaaaatgaagtcattattcctttaaaaaaaaacagtgtactgtacaatgtcataatacttttcaggtaccatgaacctcactttaaatcataatcccaattctgtggcagcttccactcaaagtcatagaataaaggtatcagctctttagaacaaagcaatatgccattataatatccttaatttaaggaacctaaaatattgagtgtagtatagttaactgtataactccaatgcagttaaattagaatttctgattaaattctaaatggttgtgccaaattcttagctgagagaactgaaatatatctctatcatagacaattcctttccaggaaagttaaatgaaaaggggagatagaggagtctttgaattaaaaagctccagtaaagaatactttgctgtgaatgcaataatataacaagctagaactagaatcactaatgagaaagtgtataccaaaatactgtaaacaagcagtaccactagctgagaggaaataatctcaaacacagctgagtagaaagcaaaattcaagtatctggggatatctgtaaaacaaagtgtatatatgtgcatatatgatactaaaaagcactacatcaagtatatgttaattcatttattcagaattcaaaatgtgtactaccattctagggtaaaaatgttgattaacagtgatgacatgaaatctatcacttgaaataataaacaaaatttattatctccaaattatgttactcatagatgttagacaatcttaagcattttgcttaagatcatagtggcatggaatagagctaatgaaatgtggtaatgccaccataggccatcaggtaataatgtcattaaaattacactaaaaaggaaacaaagaaaaacgtgttttcttcatgtgaccagattttaattttgagaaataaactctgaaagcattttaagccataaattagtctcaaatgaataggaaaaataacaatttttgcttatatcatgcagagaaaggcattcatttattatccagaagaaaatttcatgtggtgcatttatagttaaacatcttgaagcaaatcatcacttaaattcacagtgtctccattggcctttcatcaaaagagaaatatacttcaaaagtttacttcaatttgctcgttaactatgatttcgccttttctaccctatagcatttgataactagatttaaaagaatatcacacaaaccttcttaaaatattgataaacatgtttagataagatgtttttcttatcaaccgaccatatcagaaaagaagagataaactgttagactttctttcttgcccctaattatgtgtcagaaaggaaaataaggccgggtgcagtggctcacacatgtactcccagcactttgtgaggccgaggcgggcagattacctcaggtcgggagttcaagaccagcctgaccaacatggagaagccccatctctactgaaaatacaaaattagccaggtgtggtggtgcacgcctgtaatcccagctactcgggaggctgaggcaagagaatcgcttgaacctgggaagtggatgttgcggtgagccaagactgtgccattgcactccagcctgggcaacaagagtgagactctgtctcaaaaaaaaaaaaaaaaaaaaaaaaggagaaaaggaaaatgaatcacacctttctccttctgcaagtcacaagattcttttccattaaatgtggtggtgcaaaaaaaagtaaagcttgatgaaagaaagacaatgtttccatggcacccttagtacagcaaatttcaaaataaacccatttccaattggctgctttacaacttagtttaactttttttggtaagaatcactttgacataggttaacaacataaacaggttgacttcttttcccagagtaacataaacatgttgtttccaactagtttaccagttttgcctccatgcccaaaagttcaggcaagccccagataattttgtcttagccagtaaacaggatatatgtggaaatgagaaaaatgagtttaattaggaaacaatactttgttacagctgagatgattttaaatgaagcaaatggttgtaaaccatgaatgacagagcatctattttgggacattatggcttattaacagaatgctatttactttcaacttcacaaataaacacagctgtattgttctgaaacatgatgaaaggcatgcacctctactagcagatttagcacttctgaccatcaaaaacaccaacttccttaaaaatgtgcttcatgcactgtattagatttcattaagatatacattttaatgccttatttcttttttgaacttgaatgggaaccagaatggaatgatccagaagatgacctgtggtgcttgggtaaagtaatgtgttctgtaagggttggccctgggctcagggttgtttagtgagcccctgtgggacctggaactggatcttgatttcaacccagaggatcttaaatgttctctggaactgaaacaagatcttgactgtgaactagaacttcttgaagggaacctggacctagaccttgaatttgaaagggagaatgaacatgatgaagatagtgaatgtgaagattgagatattgagtgactttttctattagatttctttttattactatcgccttcttcactgacgtcaatattatattttgagagatcagcatcatcttcatcctcatcttcatctaatttatatttagaaagatcttcatcctcatcctcttcttctccctctgattctttacttcaacctcctttcatatagatgcaggaccaacaggcttccctctgcattttttctttttatatccaaactcatcatatttaccttcggattcttctcattctatatattcaacattatctttttttttttttttttttgagacagagttttgctctcgtcacccaggctggagtgcagtggcgcaatcttggctcactgcaaccttcgtttcctgggttcaagcgattctcctgcctcagcctcctgagtagctgggactacaggtgtacgccaccacgctcgattaatttttgtatttttagtagagacggggtttcaacatgttggccaggatggtctcgacctcttgacctcgtgatctgcctgcctcggcctcccaaagtgctggggttacaggcgtgagccaccgcacccagccaacattatcttttattaaagccaccaacatatctgttctttcttctaatttatcatactttggagtattacatgttacactctgatcttctggtccaattcacattactgcaagttataccttgccagtcattagcattaaataggcatcagctattttctgtaaatatttttgctattttaaaatgtgcccccagctttcatcatcttggcctgtcgttttctttttaagtattactattattaatattattaatagttgcttttacaaattatgtttttgttttcatgaaatgatattcataaaatttggtcaagttgtatttttctattttcagtgctcaccctcatacaattataccatagcttcccctttctggagataattttgattattcatgtttttattttccttatgatctccaggtaatgacttgtacttttgtggttttctattacaggctttcaaattctgattttgaatgaaacaatatactgtcctatctctttgctctgcttagatcgatctttgaagaaataacaagagggaaaactaaatggcacatggtttccactaattgtatcatgaattgtctttattttatcctctacaccacattttctatgtaaagcgtaaggggaaaataaattaaaataaaataccagtcagtgaatgaagacagaaaacattttaagagtaacaatagcaacaaaatttccacaaccatagagagctaccacaaagggcaaaaaaagaaatcctatgtataaataatggaacagtgtttaaaaaatctagacacagtagagcttcagcggtaaggcaagactgaggtttgagtggccagtctgaagtttacataagaatagcttcttaagaaaggatttcaggtaagataccttggaagttaaatttcctagtaaagtggatactgttgaattcatttataagacaacaaattcttttgctcataaccccagaagattcttgtcacaggacggcaaaactaactaatcaaattgttagaagtagctgtagtttaaaaaaagcagagccttctctttcccctacaagcatttagtttcctcatcaataaccctaaaagcttcccaataaatcagacatatttctacatatataaatctgctttatatgaggcaaacatcatgtctaatttctggagatattgtcaatttgtaatctgagtatttttagtgtattttgcctgcaggttaaaaaatgccctatttcagcaagtcaattaaaaataaatgttttgaaatgaaaaaaaaaaaaaaagactgagtaccaatatgctttggctctgtgtccctacccagatctcatgttgaattgtaattcccaaagttgggggaaggacatggaaaatgctgatagtaatatggacagtgaaatccaggctgaggtggtcccagatggagattaagaacttattgggaactggagtaaagattactcttgctatgttttagcaaagagactggtggcattgtgcccctgctctagggatctgtgcacctctgaatttgagagagatgatttagggtatctggtggaagaaatttctaaacagcaaagcattctagatgtggcctggctccttctaaaagcctatgctcaaaaaaataaataaataaaaataaaaataaaagcctatgctcgtcttcataaacagaaatgatctgaaactggaacttgtatttaaaaggaaagcagagcataaaagcttgaaaaatttgcaacctggccatgtggtagtacagaaaaacctgttttctggggaggaactcaagctggctgcataaatttgcatatgtaaagaggagtcaaatgttaatagccaaggcaatgtgaaaacacttccaaagcatttcagagactttgtggcagctcctcccatcacaggcctggaagcctaggagggaaaaatggcattgtgagccaggacaagggccccactgctctgtgcagccttgggaaatggcactctgtgtcccagccactccagctctagctgtggctaaaagggtccagggtatagcttgggccattgcttcagaaggtgcaagccctaagccttggtggcttccacgtggtgttgggcttgtgtgtgcacagaagtcaagaattgaggtttgggagcttccaccttgattttggaggatgtatggaaatgcctggaggtccaggcagaagtctgctgcaggggatgagccctcatggagaacttctactagggcagtggggaaggaaaatctggggttagaacttccacacagagttcccactgggggactacctagtggagctgtgagaagagagccaccatcaccatcttccagaccttagaatagtagatccactgacagcttgcactgtgcgcttggaaaagctgcagacactcaacgccagcccatgcaagcagatgcgtgtgctgtagcctatacagccaaaaaggtggagcttcccaagccttgggaggccaccccttgcctcagtgttgcccggatgtgatacatggagtcaaaggagaatatttcagagctttaagatttaatgactgtcctgctggcttttgtacttgcatggggcctgtgatcatctttttttggccaatttctcccatttggaatgggagcatttacccaatgccaactaacttggttttgattttacaggctcataagcaaaagggacaagccttgtctcagatgaaactttggactttgacttttgagttaatgctggaatgaattaagacttttgggggctgttgggaaggcatggttgtgttttgaaatgtgagaaggacatgagatttgggaggggccggggaacgaaatatatggtttgtgtattagtctgttctcatactgctataaagaactgcgtgaaactgagtaatttataaagaaaagaggtttaattgactcacagtttcacatggcttaggaggcctcaggaaacttacaatcatggtggaaagggaagaggcacatctcacatggcagcaggtgagagagatacatgtgtgtaggaagcaaagggaaaagagccccttataaaaccatcagctctcatgagaactcactcactatcatgagaacagcatggcagaaaccactcccatgatctgatcaccccatcacatctctccttcaacacccgaggattacaattcaagaggagatttgggtagggacacaaaacctaacagtatcagtttggctctatgtcctcacccaaatctcatgttgaattgtaattcccaatgttggagaagggacctggtgggaggtgatttgatcatgggggcagatttccctcttgctgttctcataatagtgagggagttctcatgaaatctgatggtttaaaactgtatggcactttccccttcactctctctctttcctgctccaccatggtaagatgtgttttcttcctctttgccttctaccatgattataagtttcctgagggctcacagccatgcttccagtacagcctgaagaactgtgggtcgattcaaatttttttcttcataaattacctagtctcaggtagttctttatagcagtgtgagaagggactaataccagtatgtagatggtggtttggttcccatactattcattctgtgggtcttgaatttggggcagctgcactttcttcctcgtcaccgtttctagactgtgagatcacactcactttctctccataaaaacacccagaatccactccctctcatttctttagctcctgtatcaatgccattttctcaaacactgactgtcataatttgtggagatttaagtatccacctagaagatcaataaactagcctcatagttctggagctcctctcctcttataatctgatcttccattttagctcagtcacttaatcacatggtgtattagggttctctagaggaacagaactaatggaatagatagatagatagttagatagatagataggagtttattaagtattaactcacatgatcacatgatcccacaataggctgtctgcaggctgaggagcaaggagagccagtctgagatccaaaactgaagaacttggagtctgatgtttgagggcaggaagcatccagcatgggagaaagatgcaggctgggaggctaggccagtctctcttctcacattttgctgcctgcttatattctagtcatgctggcagctgattagtttgtgcccagccagattaaggatgggtctgcctttttcacccaactgactcaaatgttaatctcctttggcaacaccctcacagacacacccaggataaatactttgcatccttcaatccaatcaagttgacactcagtattaaccatcacaagtccaccccttatctacttgaacccatacacatctcctgagatcatacataatcttcaaataaagacaataatgtcataattacacctaacataatacaactatccttcatacaaccagaaatgcaccaattcccaacccaaataatatcatataaagttaacaatacttaaatgctaatgtaaagttaataaatctcaagtcacatgaaaaaggagaaaggaaataaaatgaagatattttattggtacaagtgtatacatgcacaaacatgtttttcacaaaagaagggggaaatattcatgacagttacagtcctcgtttctgtagctggtcacatcattgtaggtggtattgaagaccaccttcttctaatacccattctgtattccctttgccttcagccagcacctcagaaggtcgtgggtgtttgttgttgtcattgttgttgttattttgttttgtttcttttttttctggtggagtaacccaaactttcattcatgatgggtctggccatttgtagtcctgcctggattgggctgttgtattttcccattgaccttaatcacagggcatggtaatactaagagatgccctaatggatctcctgtattccatgcgtactcttctttacctgccttatggagtagtagactgatttcatcttgatagcctgggtcaatcaccccagccaacactgtagctcccatcttagcctgttgacttaaagataggaggagcccaaagtttacagctgacaattttaacttctagtttaatggaattgttgttgtgtctcctggtggcagcattcatccctctggatctaagacctctaggccagcagaatgtaatgtcacaggaacagaaagcaaaaattttgctaatggatcactaggggtgatggtgagtggtaccacttccacttccaccccttgattcctggacccatgaatctggctatgggagaaacagtaccatatattggacacttattcagagcatgcacagccctctggagaactttgccccagccctgcaaagtattgtgacctagttggtgttgtaattgtgacttcaaaaggccattccactgttctatcaatcctgctgcttcaggatgatggagaacatggtgacaccaatgaattctatgagcccaccgccgcactgctttagctgtaaagtgaatgccttggtcagaggcaatgctgtgtggaataccatgaccacagagaaggcattccatgagtccacagatggtagtcttggcagaagcactgcgtgcaggataggcaaacccatatctggagtaagtgtctattccagtgaggacaaacctctgccatttcatgatgaaagaggtccaatataatcaacctaccaccaggtagctggctgatcaccccgaggaacgttgccatattgagggctcagtgttggtctctgctgctggctaattgagtacccagcagtggctgcagccaagtcaacctacaaaagtggacttccattttgctgagcccatgtgtaacctccatccctgccaccatggccactttgttgatgagcccactgggcaatgacaggggtggctggggaaagaggctgagtggtgtccacagaatgggtcatcctatccacttgattattaagatcctcctctgctgagatcaccctttggtgagcactcacatgggatacaaacatcttcagtttttgacagctcagagaggtctatccatatagctcttcccaaaatttctttgtcaccaatttttcaatcatgcttcttcaaagtccctggccaaccagccaaagcattggctacagcccatgaatcagtatatatttgcacatctagccacttctccttccatgcaaagtgcacaaccaggtgaactgcttgaagttatgcccactgggaagatttcccttaaccaccattcttcagggatgtcctagaaagagaccgtagtgttgcagctgttcacttttgggtggtgcctgcatatcatgcagaaccatctgtgaaccaggccctagtattctcttcctctgtcaattaatcctagggaactccccaagaggccattgttgcaggctgtgggagagaaggcagggtaccaggagtggagaccatgggcatttgagccacttcctcatgtaacttacttgtgccttcaggacctgcttgagccctatcacatatatgccacttccatttgatgatggaatgctgcattatattggacctctttcatcatgaaaaaggcagaggtttgtcctcactggaatagacacttactccggatatgggtttgcctatcctgcatgcagtgcttctgccaatctactttatgcataacctactttatggctagatgggtcagaaagtgcccagttcatgataagcagttcaagttgcatggtgacttgatgatccatagtcaaacattcagtttccaccaaagcccagtaacaggccaaaagctgtctctcaaaagagtagttatctgcaatagcagttatcagatgatgccagggccttgctccaaaatcctagaggcctccactgtgattcaccaatggaggcctccaaaggctccagacagcatccctatctgccactaacacctaaagcaccattggatctgctgggtcatgtgtcccaagtggcagagcagcttgtacagcagcctgaacctgttgcagagccttctcctgttctggggcccactcaaaactggaagccttttaggtcactcgataaatgggccagagtaacacaccaaaatgaggaatgtgttgcctccaaaatccaaataggcccactaggcattgtgtctctttcttggttgtaggaggggccaaatgcagcaacttatccttcaccttagaatgaatacctcaacaggctccacaacagtagacccctagaaattttactgaggtaaaaggtccctgaattttagtcagatttatttcccatcctctgacacacaaatgtctcaccaataagtccagtgtgtttgctacttcttgctcactggatccaatcagcataatgtcataaatgtaatggaccagtgtggcatctcagaagtgaaaagcaatcaagttctctttgaataagattatggcacaaagccggagagctgatatacccctgaggtaggacagtaaaagtatactgctggccttgccagctgaagacaaattagctctggtgggccttatggacaggaacagagcgaaaggcatttgccaagtcaatggctgtataccaggtacccagagatgtgttaatttgctcaagcaatgaaaccacctctggtacaacagctgcaattggagtcaccacttggttaaacttatgataatccactgtcattctccaagatctatctgtcttcttcacaggccaaatgggaaggttgaatggggatgtggtgggagtcaccaacactgcatttttcaagttgttgatggtggcactaacctccgcaatccctccagggatgcaatattgttttttatttaatatttttctaggtagagccagctctaatggcttcaatttggcctttcccaccataatagcactcacctaaccagtcagggagctaatgtgggggttctgcaagttgctaagtatgtctatgccaattatgcattctggcactggggaaatgaccacaggatgagtcccgagacccactggacccactgtcagtcggacttaagctaaaactctgtaattacctgacctccataagcccctactttaactggaagaccacaatgatgttttgggtcccctgggatcaacatcacctcagtgccagtgtccagtagtccctgaaatatctgattatttccctttctccaacgcacagttactctggtaaaaggccggaggtctcctggggaaggatgggagaaagattcactgcataaattggcagtaatgttgtggcatccttcctcaaggggacccagcctctccttcactcaagaggttctggactgtaaactggctcaagcctggaaattgattgaggggccatgattctctctttttataattcaaattagtcttttgtccattcgacctagaagttgtctgcttgtatatattaagtagaaatgcagtaggcttcctataaatttcacttctaggaacaccgtaattaattagacaatgctagagctctacacaagtcagactattctgattgttgctttgcctctgctgtcaattatggtagctatgcccacctcacctttgatggttaagtgccaccactcggctcctgccacctcaggatccaattattcccatggtatttaaattttgtagttgagtgactgcagttcccactgttagatctgacatatggagaagagcaattacaaggctcttcaaagatgcaggtgctgccctcgcaaaatctatttcacaaggccttggtcatgggtatattttctgggtcctcccggctgggatgactaggtctaaagtgactaatccactccaccatcccaatctccctaaggctttggatcccttcctctatattaaaccaagggatatcaggcatttctagctggctcacagtgggctatcttttaatcgatatttcagctaaccaagcaaataagctattagaaccttttttttaagctcctcaagctgcaacattaaatacagagttcctacttagtgggcccaaatcaataaattcagcctgatccaactctattttccttccaccattatcccacacccttaatatccattaccatgcctgttctccagatttctgtttatacaaattaggaaactcaagcagttcttttcaagtgtaatgcacctccttatgggtcacactttcaacctcacctctaggggcctgctgggatattaatctagttataggtctagaagcaaacaggggtgttgggggtggcttctgaggagaatcaacattatcttgactggcaactgcctcaggggaggccatcactgttgcctcagggagcacaggtttatgtcctcagacaaaggtggaagggctgatggcagcatgggtatgggagggtatgttgccactaccgtagatgggaaagctgtttcttctggcaaagaaagcttaatcagagtttaagctcagtgtcctaagcttcatcagggtcctcctgcatgtccccgttccaagctgcaaggtcccattattttccaaacgatgccctcactttaacagtagacacctgacaaggctgtgcatgcacctttcattgcaggtcagccacttgcatgataagagcttgtgtctgcttttacacaattttagctctttctctatgggagataagactctcactcagggcagtcttggcagatttgaggctcagaatctgcttctgaagctgagagatagaatccctaagttcatcattttcattcatccctttgtccactgaggagtaaccaaccagcttctatatgttccttggttctccacatatggtcaaaggtattaagtacagggtcactaaactccttgcctctcacaagtgatgaatcaggactatcaaatgcatttattttgcataactctctaaaccgttcatgctaaagactatcagtgctctctatattattagaagttgggtccttagcatttctgtaaacagttcatgccaaagactatcagtgttctccatactatgagaagtagagtccttaacatttctgggtctattcatattattaagcagccaactccagaaaccccaaagttaatgaaagaaccccatacttaataatctgctcctttagaaccacctcacttctggtaccaaacttgtgttagtcagggctcgctagaggaacagaactaatggaatatatgtgtatgtgtgtgcgtatgtgtgtgtatatatatatatatatatattccatatgtataatggaatatatatatatacacgtattccatatgtataatggaatatatatcatatatatgtatatatatgaatttattgagtattaactcacatgatcacaaggtcccacaataggctgtctgcaggctggggagcaaggagatccagtctgggttccaaaactgaagaacttggagtccaatattcgagggcaggaagcatccagcatgggaaaaagatgtagggtgggaggctacaccattctttgtttgcacatttttctgcctgcttatattctagtctcactggcagctgattagattgtgcccagccagattaagggtaggtctgccttttccagcccacagactcaaatattaacctcctttggaaacaccctcacagacagacccaggatcaatattttacatccttcaatccaatcaagttgacactcagtattaaccatcacacatggtcatactattgaccttagttttacaatatctgcaatcactccttaatttcaattgtaaacattcaactgctaaactaccactcttatgtttccagccaacctcttttgctaccttgacagagataatttttccactaaactaagacctgtaatcattgatcctaaagcttttcacttgttcttactccctctatatcctcctttccatcttgatgcagcttcaatttaaaagtcagttaatgtaatgaattttgtgcacatatcctactgtatctcctctagctccccatgcttctctcaattcactttacccacctagtgagactagaaccttagttaaataaaatcctccagctgcttatctttgcacccctgcatctgaacatttctgtagaaaacacaaaaccacactgaatcttcacatttaattcatgaccactaacttcaaacagaaccttaatcctgactagctttcatgctgtatttccctagctcacccactctcccccacttctagctgactattatatccttgctcctatttctttaaatctctagcaccacttttttcatccttgttctcagacaataagcgtgtttcctgttttcttttccattgagaaaactgaattaccaaatgagaactcccatactttctcaccactacttttacctacctgcctgtacctgtatttttatattctatttcccttccatttctatgaatggcttcccatgctcctagccaaggcctatgcctctctccctgtgaataaaatcctatcagcattccacaactcaaaggcatttttccagacaccctccctattttcaccattaaattttgcttctttgctgaataattcccagcaggaaacaagtcattacttctcccatgacacacaaaaatatctcaaacctatttccctttcagctaccacattgcatctctcttttactttacaggaaaaagaaaaaaacctaaagaattatctgtacttccttgatttatcttctcccattccctcttgaactcactgggttttcacaaagctatccacagaaactgatcccctcatagttgctaattatctcatacggaatttatctgtcctctcatttggtctctcagcagcatttgtcagaatttatctttctctccaccttaaaatattttgtcactccactttcaggttagtacagtcacttggttttcctcctatctttctgactattccttcttaatatcttttgttagtttctcctatctgcagcctaaaaacatgtgttgccctaaagttcagtcgtcctttccatttatacttgcttccttggtgatctcaagtctcaaggctttaattatcatctacacgcgataactccaaaatccttatgcccaagtcagactcttacatgaactccagacttgtacatccaaatgtttattggatatcttcacttggttgcctaacggtcactgtgaccattagaacacatctgatctgtgttcacaacattcttcccccaaagctttttcttccggaagtcttcccccatctgagttaattttagttatttttgtcaaaaatgttgtttttacctatgatttttcacattctcccacacttcacctcttttccatcagtatattctgttggcactaatatcaaaatatatccaaaatttgacatttccactacttcactgccaccaccttggtctaagtcatcatcatgtctttcttgaattaatacaattgatcattctgcttctgttcttgctctcttatagctattttctccacacagcacagagtgatcctgtgaaaactggtcagataatgtcgctcctcttctcaaaatcctcccatggctttccacagtaagttaaagttcctactatggcaatcaaaactacacaactgtctttcctttcctctctgacattatctcctactactcttccttaggtttctccaaagagaacctcctcactgttactttcacatatctggcatgctcctggctcaagggctttcattcatatatataactaattatatctggaatgttcttcctccagagagcagcatggtttactcccttactttacctctaagcacatatatctctgaatcagtaactccatctgaaacgtacaatctaccacactatttctaattattgttcccagctttattttttccttatcttttatcattctttaacacattgttttatttatttatactgctttgtgtcttttcaagcagaatgtaagtgatgtgtgtgtgtatatatatatatatatatatatatatacatataactattgtttctctgagcctagaacagcgttgggaaataatgggttctcatttattgaataaaaacattaatgtagatattatttattactctttatttcctttccccattctttttgtttattttcatagactgacctttatactgatcttagaacatgcaggtctgtgttctttgtctatcaacttatgtattttattttctttcaatggaatgcattccaagagaatttcctgctttaagcttctggtttaccaatgcactgatttgctcttgctctcctattgagcaaattcattgattattttaaaaattgataattatatttttaagagcttaaaccttgaattcatgaggttatttgttcttatcctatttcaaaaattatggaccatcacagaaactttgttttagaagttctacctctgattacaaaatattccacataaaaatatgtatcgatatttgcttaacccaaactcccatattaattaatattaaagaatgaatcatcttttaacaataatgcactagatgtaagtaaagctgaagactaaggggtcaatacattgaaataacacctttgaataaggagattcaagagccattttaactttcctccaacacaaagataaagtatttcaggcagaaggagtttctagttgatattttttttctaaaaagaaataggggaaaaatctgtatctttaaagactttaaaccttggtgctatcatggggtttagataaaactgagatagaaaatgaaaagagttgaggtcagtcaatggtttgttcctttcaaacaaagaattctaatcttaaaattaccagattccagaaagaaatgttctgttatataagctggaagagaaatcaaaagcaccacatccatgacagcataggtcaagaaaatataaagactcaaaactttaaacaaaatttcaaacccagcaagaacaaatttgggtttaaaatctagaactaatctgacaattgacatcagtgaggaagaagaaacgtttcttgctactaggagattttattagattcttttaataagcgttcacttgccctttatatactctgatttagttctctaaatttttactgtggcattttgtcatttttatatagcctcaaagaagagcctggaattaatattaattttgaatattaaatatgcatatttcaatttttttaactttctattttttcttaagggaataattatcactcactttgccagtgatatattataagaaattataataaacacaagttgcattttatattaatttatgtgagattgaaactaatcatgtaagtttctttcttgtccttttttgttgcatttttatttttttattttttatttctttcattttaagttcaggggtgtaagtttctataattagtccactctttcttgttctaaattatctacaactgataatctccataatgatattcagaaaataaatatactttatttcttaatttttttagttaaaataatttattaataatatgctagaatagcatctcaatgagcaaatgcagaacaagttcagatcataagaatataatttagacatgtagcatcagatgttgacaatatatttttaaattgtggtaataaaagaaacccaaattttaggacagtagctatactaattagtatactaattaagtatactaattaagctatacttaattagtataagctatactaattaattagtataagctatactaattaattagtataagctatactaattaattagtataagctatactaattaattagtataagctatactaattagtataagctatactaattaattagtataagctatactaattagtataagctatactaattaattagtatactaattaagctatacttaatattttatatataattgtgagacattattcacatcactgttcagttttgagaacacttatctttgccctagatttatttttcatttaattactgttctaaaaatagtactctactttatttaaaaatatgcaatgagatgtattcatttaatatagtataaactcaaaaatagtaagaattttttttaaaaaagagtattcaaggtactttcatttgaaggcaattctacaactatggctatcatttagtaaatacctagaaaagttgatgctagttaagtatcttttcacaattaattacatcaggctttataaaatatcatggtttatattctacttttatttttaaacattcttactgtataataaggcatacaatatgatgttttgatatacatgtagatagtaaaatggttacaagagtcaaaaaattaacatagccgccctcatcttatataattacccactttgtatgtgtggcaagagcacctacaatatacccttttagcaaaaatatcaagtacaatataatattattaagcatagtcctcatgttgcacattgctctcttgatttgctcatcctacatatttgctactttgtatcattttacctacatctccccataccccgtaactattgctttatcctctatctctgtatacttgactctttttaagaatccacatataagtgagattgtgcagtacttttctttctatgtctggcttatttcacttagtgtaatgtcctccagattaatccatgtgtgacaaatggcaagactgaactttttaaaaaagatgatgaatattccattgtatatgtatactacaatttattcattcattcattaacggacacttcagttgtttccatatcttcactatcgtgaataaggatgcaataaacataggcatgcaggtatctttataatgtagtgatttaatttcctttagatatatatccagaaaaggggtttctgggtcatatgatagttctattttaatgtctctaagaacctccattttgttttccacaatagctgaagcattctaaatctctatcagtagtgtacttgtctcttatgtttttgataatagtgattctaacaggtatgagatgctatctcatcatggttttgatttacatttccctgatgattagtgaggttgagtacttttcatacatctgttaatcatttttatttcttctttgaaaacaatgcctattcaggtcctttgccatttttaaattgggttaatttgtttttctgctatttagttgtgggggttttcaatatattttggatactaatcctttattggatatatggttgcaaacattttctcccaagctgtaggctgccttttcatgttgattatttcctttgttgtgcagaagctttttagtttgatgcagttctatttatttatttttgcttttgtagcctgagtttttggtatcatacccaaaaatcattgtgaaggccagtatccaggaggttttcccttatgttttattccaagatttttatgatttcaggtttttttttttttttttttttttttttttagcagagaacatgctttattgaggagtagatacagaagagcacattctaccacatgtggggaagggtttagcttctgtaaaaggcctttaccccttaagaaaacccctagtgaagttgcttttggataaattttaacagtgacactgaaactggaggggagctgccactgaacatgcttaaaattagctccctcaacccacagtgaatataagtagtgtacagagatgacaagagaaaggcacaaatgaccggagtcagggattgtggtgagggctccacatgaagacagcatgttggaggagaccaagttgggaagggtgacatgtcatacatcaaaagttgcccgaagatagcaggttataatgggctagagagaaattagagggaacatctcttccttcacttgaacaacaccaaaaatagaagaccagagaatagaaggatggtgacaaatcccaaaaaggaaatggaggaggagttcatggaaaagcagaagcactttaatcctagagggagggtgaggcactgtcgaaaagagaagcaaaccttggcaggggtggccattctgccttgctgagtcatgggctgagatacggaagtcactttcagtcattttcaacttctcccagggcattcagacaaaatcagtgcaaggtatatggaagtacagatgtactgtatcagactagtggaggtgaaaagttttctgcagtataattaaccagttaacatgcagcatgaaagggagaagtggacattattttggcatctgcaaacgtaaaaagtgggagtaaagagagaatgaaatatttactagtgggtactttacagtgaggcaaaaagtagtatccgctccctttcaccaagacactgcccactgcccacaggtgaactcaaatcaaacccagaaccaccacctcttcattcttctctccatctcattcagatcaattatatgctattaccatgactagtccctgggaaactcttcaaaagtatttggctctggttagcccaatacagatcaaaaagaggtctcttaatcaaaatgaaggaaagaaatttaaagcaagatggaacccaaagtgaatggaccccctgccaatctacacacaatcacaagtgccacctcttccctgcccctccatagaacacacatataaggagtaactggaaaggtcctggtggtggcagccatatttggaggtctggtgaccaggtggcaagcactagtaccacgcttagaagacacaatacaacctcatggggtgagaggacatgaggagagaaccagtgactggacaggtacagtaccataacagaactccttgggtcagtgctgagagacctgcactcaagtctaatacagatcccatccaggcaacctcactgaggccgaaacaacagttcctcagaaccagtgtctgcagtgtacacaaagatcggagccaggacagtcctgagggggatggccttcccaaaggatactgtacttgccaatcacaagagcaacagaaatgaccgacagatccctaaggtacggattcctactgctggggttcgctggctcggaatgacaggtcgctttaagggcccttgggaggggtccattttaagcagctgggatccatggttttattggagttggaccttttggcctctttggctatctactcatcaatcaggtcctgtctctttaaaactaggtgttttcccttccagtacttgagcacctgaagggcttgcagagtgctgacaatgtccacaggattcacagccgtctcctgactgatttctttgatagaaatctctttgccttggaaattacgcagttagcggagaagtacttctttccagtaactgcaacagcttataagccccagatctgagagtggacattctggggagccaactttttcttcaactttggaaagcaaataactgaaatcaataagcatcttgccatagccctgtctcatgtactgaggcatagtaaggatacaggatacgttgtagttgaggaatgaattcttttccttggaaaaatatccaatcaggtgacagccagtgttgtccgcctctgtcataacatagaacaggaagggctccacatcataatataatgtcttgtggtccagaaaaagtttggccagcaggcacaggttttggcagtagatcttgtttttcttgccatccacttcaaacacagagactgaacctttgcgatatatctcatcaccaagtgggtgtttccacacacatttggccatgtgctggcggagtatcatttggctcttcatatattttaaacagaattcacacatatagagacgtcccagccgtgcatattcttcaggatatggagaatggtaccaggtatcaaggtcatagcgaccaaaagcaattgttttaatcatgttgcttccctctgtgatttggccttgcagccttaacttctccaaatcctctgaagcccgggcttgtgctcttcggaaaagatccaagtcttactcgcttgtcaagttttctaaaagaggttcccctgtgttcccataggtctgtctgtgttccatggcagacactacaagaatcctttccaggaaagaatgatttcaggtcttttagccattttgagttgatctacagtataagggtccaattttattattctttttcatgtgcaaatccagctttccttgcacaatttattgaagagactattttttctccatgggttatctcagtacccatatcaaaattagctgtccagaaaccagaaatcctgagaggacccacagaccctctgaaggaagtggactgctcctgcaggacccgagagacaccccaaatactgtgagtgccccaattgcaaaagtgggaaagggagaacctcctctcctgaacacacacacacacacacacacacacacacactggagaaggtgaaggtctgtttgcaggagaagtttccgactttatctggagctgagtcagtttagagtgccaagtgaaaaacaggggtagagggagcagcagaaaggccctgggaccttgctgggtcccctagcaggccattcttgcctagcaccacagggatctatcggaagggtggctagaggagcaggggatacaacttcacagggagaaggaaatctccagctgaactttgcaacaatttgaacagggcaaggagcctcctggccagaactcaaggtagggcgcaaatctggtgtgcagactccacaggcgggggaggaaccaagcccttttcttctggagttgggaggcgggtaccctggggcaagttttcaagcctgactcaccctctgcctgcaaacagacttggggctgttggagggggcacggtgggagtgagacctgcccttcggttggcatgggagctgggtgaggcctttgactgctggctttcccccacttccctgacaatgccacaccttaaaattttggcaaacatatgaagaattttcaggatttatcactgtgttacctaatccctgaggattctacaagagtgtaatgctatacctctgtagcatatatagctaggatgatggtaatattttacttgaaaagtagatatacactatattacactatagctgaaaaactactgaattagcaaaattttaatagctttatccactattcttccagttaaaacgaattcaccatccaatggagaagactcatttagggtaggaacaatggtctgtagagtctgccttcacaatgtcccctcctactacaaccacttggttcagttccttgtcacttgatgactataccactataattgtctccttactgtctcatataccatgctgatatatcccatgcactgtcaacggatgaatcttcctagagtaaaattgtaatcacatcactctactgtccaaaaatctggaaagatgtcctagtacttagaaataaaggaaatatcttaccgtggtagtcaaatcccttcacagtatagcctcaaatagttttccagccttacctcaaatctttcctgtattttatgtcctacctaacgtggaacttttgtttctacctttctcatagcatttgcttgcacttaagaaatactgtgagaggtggagcaagatggcagaatagaaggcttcatcgattctctccacctcacccaaacaagaacatcaatttaacaactatctacacagaaaaacaaaacaaaacaaaacaaacctttatgagaaccaaaaatccagtgagcccttatagtacctgattttatctttatatcactgaaaaagacactgaagaaactcaaaaaacagtcttgaatcaccagtggcacccctcccctcaccccccaccctactggcaacaacagcctgctctagagagcatctgtgggtgatgggggaggaagaacacagcaattgtgaggcactgaactcagtactatcctgttagagcagaaaggaaaacccgaccagactcagctgacatctacccaagcagggagcatttaaaccagccttagcaagaggggaattgcccatcccagcagtcagaacttgagttcccacaaacctcaccaccatgggctaaagtgctctgtgctctaaataaactttaaaggcagtctagggcataaggactgcaactcttaggcaaatcctagtgctaaactggtcccagaaacagtggcttggcagagagtagggaggaaacacatggcctactgagacagaagctaaggcagctaagggagtgatgacatcattcctcacctaaccccaagctgcaaagctcacaactccaaaaatgcccacttctttccacttgaggagaggagaggaaagaatgggcaggattttttttgcatcttggataccagctcagtcacagtaggatagtgcactggtcagagttgtgaggctcccgttataagccctagctcccagatgacatttctagacacaagctgagaaaacagggcatctgctgccttgaaggggaggaagacacagtcctgaaaccattcatcccctgctaactgaagagcccttgggccctgaaaaactgacagagatacccaggcactaagtcaaggaccatggatgagcctctgagacttgctggcttcaggtgagacccagcatattaccagctatggtggctatagtgtgaaacgccttctgcttaagaaaagcagaggaaaaagtaaaggaaactttgttttgtaccttaagtaccagcatagcaacaggtgggtagagcaccaatagggctattaaggtccccaatttcaggacttgactcttggatggcttctcttgactcttggatggccagaaaggaggcaactgccctgaagggtaagtctcaggccaggcagctttcacaataagctaagatactataacactgtaactgcagtgtgtaaactgctcttatcctaagcagaaagaataaataataaacaaatcaaaaataattactataacaacttttcaaaacatacacactacaataagatgtaaatagaaaaaacaaaaagttaaaaggaggggaacaaagtcagggcatagagtttttattactttatttttgctgtttctttgtttatgcacacactgctatgttgttataaggttaaactaatgagttataagacagtatttgcaagcctcatagtaacctcaaaccaaaaaacatgcaatagatgaacaaaaaataaaaagcaagaaataaaagcatatcaccagagatcaccttcactagaggaagacaggaaggaaagaaagaagggagagaagaccacaaaacaaccagaaaacaaataacaaaatggcaggtgtaagtccttacttatcaataatattcaaggtaaatggattaaactctccaatcaaaagacacacattgccttaatgaattaaaaaacaagacctattgatttgttgcctataagaaacacacctcacctataaagacacacatagattgaaaataaagaaatggaaaaaaatagtccatgcccaatgaaaagcaaaaaagagcaggagtcactatacttctttcagatacaatagatttcaagataaaaactgtaagaagagacaaggaaaaccagtgtataatgaaaaaagggtcaattcagtgagaggatataacaattttaaatatgtatgcatccaacacaggagcaaccaaatatataaagtaaatattattagagctaatgagagataggcttcaatacaataatagctggagaattctacaccccactatcagcactggacagatgttccagacagaaagccaacaaagaaatattggactgaatctgcactatagaccaagtgagtctaatagatatttacagaacatttcattcaaaagttgcagaatgcgcattatttttctcagcatatggatcattcttaaggacaaaccatatgctaggtcacaacacaagtcttaaaacattcaaaaaattgaaataatatcaaccgtcttctctcaccacaataaaataaagctagaaattaataatgaggaatttttacaactatgtaaatatatgaaaattaaacaatatgctcctgaatgaccagtaggtcaatgaagaaattaagaagaaaattgagaattttcttgaaacaaatgataatgaaaataaaacacaccaaaatctatggggtacagtgaaagcagtactgagagggaagtttatagctataagtgatgaaaaacctgaaataaacaacctaatgatgcatcttaaagaactagaaaaccaagagcaaaccaagcccaaaattagtagaagaaaagaaataataaaaataagagtaaaaataaatgaatttgaaatgaaaaaatacaaaagatcaatgaaattaaaaggtggtttttttgtaaagtttaacaaaattgaccatccttttgccagactgagaaaaaaaatagagaagatctaaataaggaaagtcataaataaaaaagaacacattatatttgatacttcagaaattcaaagaatctttagtggctactatgagcaactatatgccaatatactggaaaactgagaagaaatgagcaaattcctagacacatatactctaccaagattgaaccaggaagaaataacaaacctgaatgagatcaaagccataataaaaagtatcccagtaaagaaaacccaggacttgatggcttcactgctgaattctacgaaacatttgaagaagaactaacaccaattttactcaaactatttggaaaaatagaggaggaaatatttccaaactcattctatgaggccagtattaccttccctaatgtcaaaacaagacaaagacacaacaaaaaataaaactacaggccaatatatctgatgaatgttgatgcaaaaatcctcaacacaatactgccaaactgatttcaacaatatattaaaaatatcgttcatcatgacaaagtggaatttatccctaggatgcaaagatttttcaacatatgcaaataaatcaatatgatacagcatatcaacagaatgaaggataaaaatgaaatggtaatttcaactgatgctgaaaaagcatttgatgaaattcaacattccttaatgataaaatttaaaaaaaaaaacaaaaacaccaaagactgggtatagaagaaacatacctcaacataataaaagttacatatcacagatcttcagcagctttcatactaaattgggaaaaattgaaagcctcagacaagaaaaataaataaaggacatccaaattggaaaggaagaagtcaaattatccttgtttgcagatgatatgatcttataagtggaaaaaactaaagactgcataaaaaattattagaactgataaacaaattcagtaaagttgcagaattcaaaatcaacatacataattcagtagcatttgtatgtgccaatggtgtgcaacatgaaaaagaaatttgaatattcccatttaccatggccacatataaaattaaatacctagaaattaaccaaagaagtgaaagatcgctataatgaaaactataaaacactgatgaaagaaactgaagaggacaccaaaaatagaaaaatattccatgttcatgggttggaagaatcaatatggttaaaatgaccataatacccaaagcaatctacagattcaatgcaatcaccatcaaaataccaatgacattcttcacagaaatagactaaaacaatcttatatgaaatcacaaaagtcccagaagagacaaagctatcctaagcaaaaagaacaaaactggaggaatcacattacctgacttcaaattatactacagaaccatagttaccaaaacagcatggtactagcctaaaaatagacacatagaccaaaggaacagaatagagaacccagaaaaaaaactaactacacacttacactgaactcatttttgacaaaggtgccaagaatatacaatggggaaaagatagtctcttcaataaatggtgctgggaaaactggatatccatatgcagaagaatgaaaccagacccctatctcttgccatatacaaaaatcaaatcaaaatggattaaaaatttaaatttaagacctcagactatgaaactactatgagaaaacagtgggaaaactctctaagagagggaaaatattattgagcaataccccacaggtacaggcaaccaaaataaaaatggacaaatggaatcacatcaagtttgatgattttaatatctggaatatctgtccaatgctgaaaatggggtgctgaagttttcagttattattgtgttgtggcgtatctttctctctagctctgataatgtttgcttaatatatctaggtgttccagtaattgaagcatatatatttaaaattgttctatcctcttgctgaattgaccacttttttattatatggtgatattctttacatcttttttaagcagagattgattagatttatttatttttattttttgtgtttttttttatttcaataggtttttggggaacaggtggtgtttggctacatgaataagttctttaggggtaattagtgaaattttggtgcacccgtcatccaagcagtgtacactgtatccaatgtgtagtcttttatccctcgccacccaccaccctttcccccaagtccccaaagttcaatgtatcattcatatggctttgcatctcataacttagctcccatatatgagtgggaacataaaatgtttggttttccattcctgagttacttcacttagaataatagtctccaattccatacaggtttctgcacataacattattttgttcctgttcatgccattttcatggctgagtagtattccattatatatatatatgtatatatatatgtatatatatatatacatatatatatgaaaatttggtatatatatatttatctactcattgattgataggcatttgggctggttccatatttttccaattgcaaattgtgctgctataaacatgcatatgcaagtatctttttcatataatggtctcttttcctctgggtagatatctagcattggaattgatggagcaaatggtagatctgtttttagttcattaagaaatctctacactgttttccatagtggttgtactagtttacattgccaccaacaacgtaaaagtgttctcttttcaccacatccatgccaccatctatagatttttttattttattatggccatttttgctggagtgaggtgctattgcattgtggttttgaattgcatttccctgataattagtgatgttgagcatttcttcatatgctttttggctatttgtgcatcttcttttgagaattttctattcatgtccttagcccactttttgatgtaattgtttgttttgttctggctgatttgtttgagttctttgtagattgtggatattagtcctttgtcagatgtatagattgtgaaaacttcctccaaccctgtgggttgtctgttaactctgctgattatttattttgctgcacagaagtattttttttaattttaataaactccaatctatttatctttgtttttgttgcatttgcttttgggttcttggtcatgaagtctttgcctaagccaatgtctagaagggtttttctgatactacctcctagaatttttatggtttcagatcttagatttaagtctttgatccatcttgagttgagttttgaatagggtgagagatgaggatccaatttcattcttctacatgtggcttgccaattaaatattccagcgccatttgttgaatagggtatccttttcctaccttatgtttttctttgctttgtcaaaaatcagttagctgtaactatttggctttgtttctgggttctctattctgttccactggtctctgtgcctatttttataccagtgccatgctgttttggtgactatgcccttatagtatagtttgaagtcagttaatgtgatgcctccatatttgttcttcttgcttagtcttgctttggctatgtgggatcgtttttggttccatatgaattttaggattgttttttctaattctgtgaagaatgatgatggcattttgatgggagttgcattgaatttgtagattgcttttggaagtatggtcatttttacaatattgattctatgcatccatgagcttgggatgtgtttttatttgtttgtgtcatctattatttttttcagcagtgttttgtagttttccttgtagaggtctttcatgtccgtggttaggcatattcctaagtattttattttaatgcagctattgtaaaaggagttaagatattggtttgattctcaacttggttgctgttggtgtacagcagagctacttatttatgtgcattaattttgtatcctgaaccattgccgaattcatttaccaattataggagtatttacataagtttttagggttttttaggtatatgattatataatcagcaaacagcagcagtttgacttcctctttaccaatttgaatgcccttgatttctttctcttatctgactgctctggctaggactcccagtactatgttgaatagaagtggtgaaagtgggaatccttgtcttgttccagttctcagggggaaagttttcaacgtttctccattcagaacagtgttggctgtgggtttgtcatagatggcctttattaccttaagttatgtcccttctatgcctattttgctgagggttttaatcataaagggatgctgaattttgtcaaatgcttttcatgcgtctattgagataatcatgtgatttttgtctttaattctgtttatgtggtatatcacatttattgacttatgtatgttaaaccatctctgcatccctggtatgaaacccacttgatcgtggtggattaattttttaatatgctgttggatttagttggctagtgttttgttgaggatttttgcatctatatttattatgaatattggtctgtagttttttttaatgtcctttcctggttttgatattagggtgatatgggcttcatacaatgatttagaaaggattccatatttctctatcttttgtaataatgtaaatataattggtagcaattctttgaacgtctgatagaactcagctgtgaatctgtctgttcctggactttttctgttggcaatttttaaattaccattttaatcttgctgcttgttattgttctgttaagagattctatattttcctggttaaatctaggagggttatatatttccaggcatttatccatctcctctaggttttctagtttatgatgcataaaggtgttcatattagccttgaataatcttttgcatttctgtggcatcagttgtaatatctcctgtttcatttctaattgaccttatttggatattcactcttcttttcttggttaatctcactaatggtctatcatttttatttatcttttcaaagaaccagctttttgtttcatttatcttttgggatttgggggggtttttgtttcaattttatttagttcttctctaatcttatttctttttttctgctgggtttgggtttggattgttcatgtttctccagtttcacgaggtgtgaccttagtctatttgtactttttcattcttttcgatgtagtcatttaatgctataaactcttctcttagcaccatttttgctgtagcccagagattttgataagttgtgtcactattattggtcagttcaaagaattttttaaatttccatcttgatttcattattgacccaatgatcattcaggagcaggttatttaatttccatacatttgcatagttctgtgggtttcttttggagctggcctccagttttattttactgtggtctgagagagtacttgatataattttaattttcttaaatttactgagacctgttttgtgtcctatcatgtggtctatattggagaatgttccatgtgctgatgaatagaatgtatattctgcagttgttgggtcgaatgttctgtaaatatctgttaagtccatttgttgtagggtataatttaaatccattgtttctttgttgaatctctgtgttgatgacctgtctagtgctgtcagaggaatattaatctcccccagtattactgtgtttccatctatctcatttcttatgtcttgtagtaattgttttataaatttgggagttccagtgttaggtgcctatatatttagaattgtgatattttcctcttggactggtccttttatcattatgtaatgtccctctttgtcttttttaactgctatggctttaatgtttgttttgtctgatataagaagagctactcctgctcactttcggttttctcacccctttaccttaagtttatgtgagtccttatgtgttcagtgagtctcctgaagacaacagaaacttcattggtgaattcttatacgttctgccattctgtatcttttaaatggagcatttaggcaatttacattcaatgttaatattgagatgtgaggtattattctattcatcatgctatttgttgcctgaataccttgtttttctttattgtgttattgttatatatgttctgtgagatttatgctttaaggaggttccattttggtgtatttcaaggatatgtttcaagatttagtgctccttttagcagttcttattttcaggcctgggtcctttccttcaaggcacaggttcccttctggtccaggatgcatctggaaattttgtctgggagctagggcctggaacatgggttcactactctgactggtgccctatcctgctgtggctgagctggtatccaagatgcaagacaattcatccacactatttcctctcctctactcacacagaaaaaaaagtgtcttttttggagctaagagctgtgcaatggggttaggggaatggtgatgccagtgctcctttgcccaaactgttgtctcagaatgctgcctgcatcccactccactgtctctgggtctagtatagtattaggactcacttaagagttggagtatttatggcctagactgtctttcaagtttacttggaaacagagatcgctgtagccctcagtggtaaggtttgtgggaactcaagtttggactgctgggattggtgatccccctctggctagagctggtttaaatgttccctctgttgtggcgcatcagctgagtttggacaggttttcctttctgctctaacaagacagcactgagttcactgcctcacaattgatgtgtactccctcactcagtgtccagagaggctctctgcaccatgaggctgctgccaggggtgtgggaggggtgttgtcagtgattcaggactgtttttctaactattcaatgcttctctcagcaatatgaaattaaaaccaggtactaggagtactcacttgatttttgcttcttatgaggattttttttttttcagcgtaattgttaaattggtgtcctcatgtgagcagggggatgatcaccttctattccgccatcttgcttccacttgatagttttacagtaaactttcaattcttatgagtttttttcttttctgattagatttatttccccagcacttaacagaaatttaaatttgaaataaaaatgttttatgcattacattttgaaaactaataaaattactattttaaaaattcaacctacacaatatcacctagtaaaataagtacaattaaaataataaattatatatttataaataagtaaaataattattattgagaaattttttaattaactacctagtaccctctctttaattttgtatcaatctaaattaattccagatagtaatgtatctccaaactttccttagaatttttttttttctggcatgctctaaatccagtactagtacatcactccataatatcaggccaattcaagtgaggggagatttttggctgacttattttatctgggtaatttattgcagtatgctttaaaaaaaacagcctacataaagtaatctaacatctactctatcatttatattctagtcttaattaataaataggagatgctatagttatctgatctcctttttgtcaccataaacatctatgttcaaaacaggtgccatggtatcaatgtatccctcaaagttcatgttcattgatcttcaatataacagagttgagaaggggacttttaagaggtgattaagtcagtggattaattttgttatctcaggagtgagttcattattatgagagtgagtttgttataaaagtgagtttggccatctcttgttctctctcactttcttgctcttccatcttctactgtgggtttatgcagtaagaaagtcctcaccagatgtggcccctcaattttcttggacttctcagcctctagaactggaagaaatgaatttcttttctttataaattaccctgtctgttgtatctgttataacaacacaaaattgactaagacaacagaccaaatagggcagaaaacaaacaatctgtaccttatgatcattctgtccatgaatgttgtgttgactctttgaccttttggaatacaaacccattcatctagctaaaccttcagcagttacatgctcctacctgttttatctaaacatgtttgaaatgtagcagggtagttcaacacttcaatggcacattctggttatctctgttccaccaatgtaaatctgttaccaagatgtttgttattcattttttatttttgtttctgctcttaatttcaaatccatctgttatgagttgaattgtgtttcctcttcctctaaaaaaaaagatctttaagtcctaaccccgcaatttctgtcaatgtgaccttccttggaagtaagatctttgcaaccaatcaagttaagatgaggtcattagaatgagtcctaatccaatatgaccatgtccttataataaagaaaaatttaaacacagaggcatgcagacttctagagtgggaagaggatgtgaagatgcagagacacagagagagaatgctatggaaagataaaagcagagagtaaagtgatgccagcaaacctccagaaactaggaaagaggtgtggaacagattatccctaacagccctcagaaagaaccaattctactgacaccttaatattggagttttagcctctgaaagtgtgacataataaatttctgttattttaagccactcagttttaggtaccttgttaccgcagccttaagaaactaatactccatcttttcccatgacagaaatatagcaaaaactatagtgtttctatcttgagaaattccattgtttctcaattaatcagtatgaagtaaatattcaactaattttaaaagaagagaaaaattatttccctatcagccaagtagctgggagcttagggacaatgttttatatagaaacaatttaatttaatgattccttggaaaggcattgtaacctgctacttgttaaaataagtcaataaggaaatttcccataaacttttttgagaaagcttgccctctacaaagaaagcattattggaacatgaactttaaaagtatatacacatgtgagcatgcacacatataattcaacaaaggcatgctcaattttgttatgttctaattcacaatgactacatgccttttcatcctaaataatttggtaattatttaaataacataggtcatttcttttacttctgcttcaaacttgaaggtgtcaatgaaaaaaaaatcctctacttagctttgccaatagcaacctgatctgatgccaaggcagagatgagactgtactttcatttcgtctaggttgcagtcttcagcctcgctaaataacataggtggtttctcatgcaaaagcacatgtaacattattttgaaatgcacacattcttctactttctatgaaaacacagtatttgctgtttaagactgtttaaggtcttcaatgcttttaagaactgagagctacatgagaaaataaagttgctgcaagattcatgttcacttcagtgggagttgcacaagtggaatgatggtcaggaatctgtcctaattagtaggcactcctgctttgctgcatcttagttatgccactgttaaattatactcagtaaattgaactatcttctagtctctgaagagattaatgttacatttggattgtgctgaatgccaaccattgatatttaacagagaaactttaagatatctttaagtagttttacaaatatatttcctatgatgaagttcattttttccttacacaagagaaaaagaaaaaggaattagaaatatttgttttaagattattatggaatatcacctaaagatgttaatgatatgttccctagaatattaataacttataaaaaggataaaatatttggataaggcttcaaaatgtcaccttcatgcagcaaactagtatttttcagaattatacttttttctgcccaagactgttttcatccaatctctctacaatttatccttgtgacattcctatcatgagatccgacgacggtcagatggaagaaactctagagactacatctccttaccttggctgcttcttccaaaagtacactcagaaataatttgttcctacacttgctcttatattggaataaattatcttaattaattgacaaaatgtaatgctagaatcaaaatcttcaagaatatatcagctaatcacattgaatgcaattaatatctttttagcctgaagggacttatagttgtcatacttttatcgtataatatgcaatacaaataatttgttaaaatcactttatcttcttctcattatggactccttggttcataaactatctttagatattttaaagaaactgtcttaagatatattatgaaaaatgctattttaaatgtcatatttagtatttcattaatgcatttgtttctaactgcaatcacaggaaacaaattattttgtttaagtaatacatacattatttaaaaagaagcatcaatacaattgtagcaattgaggacaagcaggctttaaataataccacatccggaaagacaatgtctttaagagattcgcaatgacattttcatatttctattgtatatattgacaggtagtttatagatcttccaaatagtttcaggaaagcattatgttgaaaaaattgtgtgtgtgtgtgtgtgtgtgtgtgtgtgtgtgtgaagttttatcacaggcacagagagaaaccccagtgctatcttaaagaaatgtgtctttcaccaaaagagcataaaactgcctttatgtattaagcgttggccacataatgacacaaaggccttctcagaccccacaaggagagctcttgacttctaggaagcttctttatcgaaacagttaagcattgaaaagaaactttaatggacttgatttgttttaagttaagaatctggtggtccatactataacagggaccatctttgtgcaggatagaggctaaataaaggccacacagctcttacttggctttcattaagaaaaattcaatcagttaaaataccttcctacttttctgtataagtcgtgcctatacccatttaaataatgccaggaaaacagaatgctaatctcctcatttatctaaaattataaaatattagtgtttcaaaagtaaacttataaatgaaaaaaacgaagaccagaaggaacatagttaaaaccacatactagttagtagcagaaccaagagctatatatcttgggcccctcaccaggaaaagctttagtaacacactgctttaactgcaaattttatttttttctttaaataattagaaactaaaactttttaaaataatgttgatagcttatattgtgttcagatactatcatcatatcaaagtcagaatgagatttaaactctgattattttcagtataatcttacaataaaagcactttttaatctgctcagtgagaatgtctgcattataatatctagttctcttacaaggtgaatagaggcatgatcacttatggaagtagtatatattatacacttcattgcttcaacttctaaggaattagaacagaaagaaaaatctgctcttggattagatagagaccaataaaaactaactggcttcttttggtacatttgatgactttaaatatttcctaatcttgaactcttttccacatagatattaaaaattttctgaaatacaattaattatgatgggtatattatctgggcaggtaaacaagtttttcattattaaaatactgggcctctgtgtttgcaatataaatgtggtgcataaaaagcttctcactgtctgcattgcatgttaacaatattccacatttaaattctcatttagcatcagaggtatatttttaaatgatattaaatcaatattcagtacctattatttgttcagtatgcatttagcactgtcttattctcaccagggattctatctccagatgatcataaatgttcattatcccggtctgtgaagtgagtttttgcataatgagtacctgtagacttttctctcttcgttcctccctcttcaatctattagcattgagacacgtgacttttagttttgtataaagcaaactgttgcgacggctagtggaacaacattgaatgttttatagcgtacaaacagaactcctcttttgttacgtaaacctaccttctctttatacattttttggttcctcttcagcttggtgcagtgtgaattttaaacagtaacagttttctttacatagaaggtctcccattactaaacatcctgcccctacataatagaggggctaaaacgatgtttagcaatctactcaagccatcaaagagtatgcattgcccaagggtatagattggctccttttagataacatgtctagggaaggttgctgcatggaggaccttacactggtaaatcgagtcaagacattattgttctggctgtaaaatagtacacatttgtaagtatttgcaagattacacatgctgggtctgagaatcaagctgaagggtcattattcagtttcatcatgactcagagctacttcaagatccagaaaacctttcaaatcagtaacttgaaaaaatgcattcaccatagtattagggctaagttacattacattttatttcaatgctgtgagaaatgaaagttatatgttgtatatacagcaacatttaattaacaagaaaacaaaattaaccaagaaactcaggctgctacaaatttattatcaactacagtttcttcatcttcaaaatattcctaatatactctttggtatttcccaatattccaaactatacaaaatctagaaaatttctctatttttgacacatgggaaattttaaaagataataaagtaccttccacccagaaaacacacaattgatacatgtcaactaagtaaaagacttattgaggtatagagcaagtcaatgttaaaattagaattaggtcacgcctgtaaccccagcactttgggaagccaaggcgagtggatcgtgaggtcaggaattcgagaccagcctggccaacgtggtgaaatctcttctctactaaaaatacaaaaaacattatctgggtgtggtgacgggtgcctgtaatcccaactactcaggaggctgaggcaggagaattgcttgaaacaagaaggtggaggttgcagtgagccgagatcacgacactgcgctccagcctgggcgaaagagcaaaactccgtctcaaaaataaattaaaataaaataaaattagaattaggtcttctttcaccttattgattaccttcaattcattaggtactatgttaagttctagggagaaaccaaaaggaataagatccatccactactctcaaaaagcagagaatctagtaaaggaaatgtgcacctggtgtacatatctcataattcactaattatacagcctttatcaaacatttactgttttctatattttaggtgctatactaggttccaggtatacaacaagaaattaaaatgcagtcactgcatagctgaatgcggaagaaaaccatagtaacagaaaaaaaataaatacacataatatacaacaaactgtcatgactagttactaaatggtaagtattggggatatgaactatgaaaaaaaatagaaatgttacctgtcctatggaatcagtctagtgacaatgtcagcgtttaaataatatttacaaaataattacaatagtgaggagtgttttaaaggaacagcgcaatatggtttgtgctatatttgatattagtataaggcagagtagtggcacaagttaagtggaactaacttcacctaaaaaactacttgaggggccgggcatggtggtttacccctgtaatcccaatactttgagaggtggagatgggaggtttgcttgagaccagcctgggaaacataggtaaacatcatctctaaaagaaatttttaaaaaattagctgggcatggtggtgtgcacccatggtcccagctactcgggaagcttaggtgtgggcggggggtgaggggtgtcgcttaaggccagtagtttgaggttacaataagttattatcacaccactgcactccatcctggaagacagagtgagaccctgtctcaaaacagagaaaaaaaaacaaaaacaaaaacaaaaagctacgtaagctggaccataaaggatatgtaggaatttgcaggatagaggagaaaaagagcattaaagaccagcatttacaaaggtcaaaataagctccttccagtttggaacagcccctcatatacccacaacctaataaaaaatttacaaagttttaatttgtttttcagaattattcttgtgatgtctagaggtttatcaactttcttaagttagacaaatgcagagtctagttacttcatctatcccaatacagtttactgtaattccaacagaaatatagtaaagggaacaaagaaattgttagccagtgatgaatcagaaaaggcactataaggaaagttcaaattgaagctaccatgaatgagtaggtagatatgtgtttactctacaggaagccaaggtgtaagaaatgttggagaacaaacttcatatgtacaaaaacagatatagcccaaacatttggaggcattgtgggaagaaaaaatggtgtctcatctaaaaatagctcgggatatgacccactaattgcaaaactaattgttgaatgtctagctgttgaggcattctgctagatttctcagactttggtcactgtccctgccctcaggaaatgtgcaaactagttgaaaagctaaagcaaaatacaaataatcatgctctaaggtagaatatgaaaatctcaaaaagagaagtacaaatgaaatatcctgagaagaaagaaataaaattaaatgaaaggaattgtaaaagaattcctaaaggaattagcattcaggttgaactttgagtactaagtaggatctcaacaggcagatatgtagggagggcattccagtcacaacagcaagattgaaagtatgaagatgatagtattcagataacagaatgttcaaataactcagtccaggtttgcttgagccttgggtatttacaagacagaaaactgaaaaggtaagtcaaaacaatattatagaagtcagaagagatttatctgataacactattttttaatgaaggaagtgatgcaatggagccaatacttagggaagattaatctaaaatagtttctatttaagacgcagcctgtctctctgaactcgtgatttgttaatcaataatagactacaactacatggaccatagattcactttggagtgataggaacagttgttctttagttaatgaaaactactactaacggaatgagatgttttgaataaaacagactgattttggtatttcctgccccactctcccagaagagacagtggcaaatgtctatctctaaaggcccactgggaagggacaatgcaaagtcatcccaaatggagagacgcacttggagaggtaggtggggaaagtagctgagcctgggtaggtgactgtgttttccgtggtctccaaatagctgagatacatggttttgagtctcaagagttgatggggaagagacgaaacttcaggtgagttccatctagagaacacatgagctagacctagtcccagccacaaaccttgtgcctgagcctgtcaaacaagaagcagtgctacagctcacaatggaatatgaaagctgggctaataagcacatcggcagggacatttgaaattctggattgcataaactaaggcctttttacaacctggggaggtaggacaggagacacaataataagtaatattaaatcttccccatggaatccataaaggggacttcaggtcagatttagtttggtttagaaaatgagagttgtttccagagtttatgataaggtaaaattaatacctgatacactagcagaagtttctggctttgatctagaaaatctgagttttaacagaaatcatcaagctctttaagaagccgcagcactactgttatttagctatgataggaaactacactggtatttgcatgctttgctgagtgcaatgatccctttttataaaacaacgagctttgataattctgttctcacaatggcaggtacctgtaacaaaacatctagctttctgacagaatagacacaggattctacccagttgacaggtttgggtttttttctgaatatatcaaaaggaagctatccttgactcatcctgcatgataagataaaacttttatttccattgaatttctacatattcccacccctgccactcctgcattcagtgaccactactaaaggaaagcacacacacacacacgtgcacacacacacacacacacattttagagaattcttctctttcatactttacttaatggggaaaattgccgccctagcatttcagtattggcaataagccaattattcacctcagtcctacagcatccctatgttccttggttaatgaaaattaccagcaagtctgtaactatgggcatgaattgaaaagtcttgggtcaacagttttagcacagtctagaaactactttctagtgccaaacgactagattagcctgagaaccatctatgggtcttcagtattctctgatgtataaaaaataataacttggttatacagagaatgtggtctctcttaacacttctctctctccaccctctatatgcctttttaaaaatctttcttttcatctttctgtccaccctaccaaagttccgagtcccaaatgcaaactcccgttccagattatatattcatcacagccagtgctcttcatagcctaatacaataaaatcaatgcaacaatgtcacttgtcagtctctttgtgcataagataaaatgatgccatctgtgagacaaagtaacatagggttatgagtcatctccaactcctgtaaaatagcctagtcagtctgggcctagggagaaaatgatgaagagagagcaatcagaaaatcagtgcactagtgattcatttgttaatttatagaaatgtgaagttcttttaagctgatatgggcagatcaactgacaaacctgctatgcgcatctgcacttttattatacttttattatacctgctaagcacacctgcatttttatgatagagtttgcctgaggccatcatagcagcaggaccgggaatacattagtaaaattagaagaaatatcatcaggcaacttcaggctgcatgtaaacaattaacagctcattaaggagaattttacttttgtgggagcctatccttcccttgaccaagtttaagctggctaataaatagaggcatccacaatgagggtcaggagtatctcaaattctgtgtccctgtttgactcaggattaactttaagcatacttattactctataatcatctattgaattatacacttttattatgacagtccaaccagaaaaaaaaacttaccttcctaaattcttttcacagtcccgcttctgtaatatccctatttgattctgaggtgtaagttaaatatactgaatgtatgcagacatattttagcctctggaaaaggttttaactgaaatgttagtgggaaatctaagaagcaaaagtgctgatgaagcaataaaatgggtacatattaaaagcaatgaaccctccccctcaaataagagattaaatggtgtataatttccaaactcttcaccacagtctcaatcaagtttagatttaccagcatcacaatctgcctaatacattcactgaagcactttgggatttatttgacagtttaaagctttcctcccaaattactaattaattggacttgagtctctaatgctaagtttgcttattttctaaatttttttaaaaaaaaaacaccttgatttacaaatctctaggtgaacttgaaatgcatactttgaaattgagcatatagttaaaaagaatggaatgtacaagatttcattgtataataaaatagtactatctgacatgcaggagtttagaacatataataattgaggtaaagaggtcttgtggtcctgcatccttgctgaaaaatgttggctttggatataattttaacctgtattgcactgtagtaggatttatttagtcattcagttaacatttattaaaacctcactgtgtgctaagcattgggctcctcagaggtacagggaggggttaaattggtttctgttctccaggagctcacattctacttggggagacagatgtgtaaatggctgatcacactgacaagggtcataaattatgtatgacttgagtgttgtgaggtcccaaaggaagaagcaacttcttgagggtgacaccactgaggtctctagtagtgactggcttgtatctctaggtatagtagagaatacacataatacacaaaatgacacataccatcttattctcttatagcatcctattcttttcctttggaacagttatatcaactgataattatgtgtgtgattaattcattaatgtctgtctttatgactagactatgaaaacctggaaggtagggactggtctgtttttgcttaccatccccggggcctattatgatgctggcacataatagatagtcagttattgtttggtgactattgaatgaaggaatatgtgttttcaagctatgggaagatatttattatgggaaacttcactacaatattattggctaccactttgcccttttaagaagcttattcttggattttcattcaaatagttcacccatccccaaacaggtagttatcctctgacgtaagcagacaaaactaacatgagcactaccacatgcacacctacaccacacaggttacacaacatatggtcgttacacaacgtatggtcattacacataggttatacaacaaaaatcacaccaagtcatgacatgcaacacagcttatcttttgggcactgtatgtcttagcacaacacatgtactttacccaccgcttatctcataagtacatgaacgtgtccttactcacactgtccccatgtcctcctttctctccttagcccttgtcactccccgcctgtgaaaataagtgaaggtttcatagaaaatgttatatttgctggagtcttggattgagcggactttattgaaatgaaaacttagataattttgatgttttcataaagagaaacttctgctctagaagcatccaaattcatagcaggagacatctgaccctagaaaatcacatcataatggaagcaaccatctcaaaataatatgcctaaaactttcatggggtgtttgtgaaactgaaatagtcactgaaactcaatataccccttgctttgcatggaaatgcataaaaattggccattatttgttaagaagaatatgggacaaagattaatcaaaatgtggtatagatatattcaaatggatgttgatggagtatctcaatgcctgtacttgacatgtaattgagctaaaaaaatctgaacattgttcccgaaatagccacatacaacacaactttttcatcttcttcatgtgtctaagacccagtgcatatatgacttcatccattaaaccctgcccaattacttagacctcaagtaatattcccttctctgaattcctgtaactcgcattgcctgtattacttattagacacttaatgtgtacagtactgtattattatctaacatttatgcatgttgaaaggccatcatccaagggattaaaaagaccaaaaccatgattttgcacaggatgaattcctgagaagactagagatatttaccttagagaagttttgaggatgggcaagaggtgatatgctaattatctttgactaatctgtgttcctatatgggtagcaaataggatggttctatagggctccaaaagataaaaccagggcctatggttaaaaactattgggatattattttcaacccagttcaaaaatgactttccagtagtcagatctgatttgacagagaatgggctaccgcctcaggagataatgaagtctctgctattaaaaatattcaattagagaagagttcaagagaaaacttaaggatcaaataagcaaaatgagatttagaaaccttttccactcagggattatctgatttttaatatgctttgccttctcaactactctataaatttcttaaagacccagactatcacatcactttccatccttggtacgtatttctttatctcaaacatagtagatgctcattaaacatttcttgatcaagacagaccctgatatcaatactgaaataaaactttaaatgtttgagacaatttttggaaagcagttaactacattaacaatataattaaaaatgcgctctgaatattccacaccatgaagtatcatgcaattattactaaccctaacagtatattaacaatagtattcatgatcagcaataaggcaatagcaattacattagtactgataatattagtgatatttacaatgattattaggccctgacaaattttagatggatacactataatcatacattgaataataacttcataccagtaaatcaatcagaaataaaatgaaactgaatgagttattaggtgtaagtgattatggaaaataaaaattgaaaattgtgacttagagtttgccagaaaatagaaccagtataagaaaagtttaacagaacttagaaataagttcaaaagagctaagaaaaataaggtcaactagtcagtctggacctaatgaatacgcagttgatgagatttcaaaaccaaccattgagggcgagatgtcaaaacatcaatgtagaaatcagacattcaacctcaactaagaaaaaagtacagttttaactaagaacaccttgacgtatgaagggtgcttgtgaactcaccctgtattgtataaaatatatcccaggaaatggaactcctgggaaataaaccaccaactcacaaagcctccttttcctgtctactgaatgtgtcattctagaataataatataaacagagggtgcatgagggaattttttgtgtgcatatacaggggattttgtgtggagctgtatatgtgtaaccaagaactgaaatatttgactaataaacctgttaaaatttattccaatagttttattggtaagcctaaaacaatctggttttcttcccaagaaccatgataaatccaaggactttcacaagattaacctaagttagaactggagtgttgttggaacttcaaggcagcttcaagtgacagctggagggagaatttcaatttttatcaaaataattgttttaaaagatgtgaggttataaccaggaaagtaagaaagcagtgaagtccaaaagggtgggtacttctaaccattgcaatgaggagaacaaaatgataccaaaaactggcaacgacataatccagccaagtgatactagcctgaagttgagaatgctgaaatattagtgtcccatttttcttctgtgtcagttcatggtccagggggatatccctgtagacaaagaagctcaaaagggccagatataagcaagcttgagatttcacattgtgacatatgttagctgtttcatttgacacttcttttccttaaagttattgtgtataccagaccatcaacctaatagcaataataaaatgagtaccatctattgagtttttcaatctatcagatgctttataaatataatttggtttttttttgaatcctcacaatttttaacctcattttacagatgatgaaatccaataattaaactaatcatacaaatgaagtaacatactaaagaacaattggctgggccaggttccttttgcctctgaagcctggagtggttctttccactccaatcttgcgaagtaaatattcagaatctgcattttaacacggttcccaggtggtttacatgcacattaaattggagaaactggatatcattctgctttcctgctgtttctctcatcagtcatacacaaacacaaacacacacactcacacactcacacttacacaaagagaatggggggtggggagagaaagtagtacaagtcattatctactttaaaagttagaaatatcgatacactttctctaacaacctctgcaaattttgaatacatctgttaatcaggctcattaaaataacatatatattttatcagctgttattagcattcagagtgtttactgaataaaataactttagataaaaatgaaacaccatattttacaacagtttatagaggagcataaaaagggagagaataaaggcatgagtcatacagaaaaacaggagtctgggtttgctgtggttcacactttgataataagtacaccagcaattacaaatgatttataaacggctgtggctatagaaaacccactgtctgtaataattgcaatccaagctttcatggagctattttccctgaaattgcagagagaatggtaccatgagaattcttcctgttttcataaattcaccatcaattttggttgccagcaaactttatttccaggtgctggacctttgcaatccaaattattgttattgaaaagaaaactgaatgagaaacaatctgcatttggtctaatttttcctccttaatacattttctaacataaactctcacttttctttatctatgcatctcaatgagtaggtaatttttaaattaagtagattggccctatttgaaaattctatttttatttcaatcttgagcatgctgaaatctgttgaatataatacctaatataggaattaaacaaatttagcatggatggttctcttttctaagactaatgccctatctcactgcttctccaaaatttttcttcatagttatcacctgagaaccttgtaaaaatgaacattcggattcagtaggtcttgggtgcatttctaacatcccaggtaatgtcaatgctgctggtccaagaacccactacactagcaaaggcactatacttaatttagcaacagtgaaatgtctaattttcagtccgctttttcacaaagcaaaactgagtcaccttttaaaataataaaagtaatacttagtcatgcattattatatacaacatgtaaaatcataaaagtaggaaaactaaacataatcttgccaaccagatataactattattaacatctggctgtatattcttccagtctttcttcaatgtacatacatctagttttacaaaatggatatcttgccattcattatcctttgatttaacaaccatatctagaccaccccaaatttttgcacagttttatatcaaacctccaaacctctcttcacagccatatgtatcacttagaaatgtgagtacaatactatcaaccacataattcaacaaagcaaactcaacagctttttatccaggtgttaatgcagaacagcaagaattctataaaaccttgaaaacggtgcagcataaatattaatagcataatgctgtcacagcttcatatgcactgggtatacacaggcagggcctcctctgctcaaaaatacacttcatttcttcagagtgttgcatttctttctaaacctgatctccagaggcatatttggggttattttagtcattctctcacattcactggggaccagcttccttagagaaacataagttttgttccgtttttatttttttctctctgcacggcttgctcgcctttcttgaccttttcttggcacgctgtagaccacagctgcttcaactgatggggcaagagtctgatgctctgctctgcccaggtgttccttttcattaacactgcatcaattcaggctgtcagacaggctgttatacccatgacaactaaacagttggtagaaaacaggtacaggtgggctaccagtcacttatacatgaatcgaaagggctactcttgtcactcatccttagtggcaaaatggtataatagaaatggattacgtgcaatattctgtgctatttagagatgcatgtgacaaactggaaaaatgaggatgcatactttaaaatttaaataaaagtactctgccaaaatgtaagcatgacaataaatgtgttttcttatgaaagccaggcatgatacaaaatcgttttttaaaaaataattttagctagggtagttaacacagtttgaaagattgagtaaaattatttggtgtcagaaatagaacaaactcctgtctggtaagctaataattttatgttagctatttctgggtatatcgtctctatgttagcacagcagttctcaaactttagtgtgtgtcagaatcaccaaaagaccttgctaaaacgaagattggcgggccccacccctagagtttttggttcagtagctctggagtggcatctgagaatgtggcatttctaagatcctaggtgatagtaatggtgctggaataataagaatgcttagagtcgtgcaataattcacactgctttagagaagcggttctcaaaccaaagttggcaaaagaataacttgagatgaaaagcttaataaaatgtagattctagtgtctcaacttctagcactttaataaacgattctgccacagatgggcctacatagtcaaccacattctgatgatattattaggttggtgcaaatgtaattgtggtttttgccattacttttaattattgtaaagagattgattttcacaactgaaagaacatcaaaatcacttaaactagagcttctcaaactttaaggcacatactaatcacctggaaatctgcttagactgtttcagtaggcctagggtgggacctaagattctgaattttcaacaaagtcccaggtgatactagaaagcctgttaataaactatagactgacaagtcccatcccagacatttttattcagtagaatgagaatatatttccaatttttaaaaatgcacccagaatacactcagtatatttaaattcttttggtcactccctgtaaccaaatattttgagattgatttttggagattcgatatagtaccagtaatattgtatgtttctgttgaaaaggcaaagcatctgaggcagatgagtggggatttttttgaaatgaaaaagacttgatgtgatagattgcattttccaaatgtctgcaacaataatccttatcccacatgcttttctacaacatagacttgatattcttcctattgagtggtaagttctatgtactctcctcttgaatctaagtgggcttttgacccccccatgtaattgacaggatgtcagagaagaaaagatgcatgacttcttgacttccaaggcaatgtcagaaaaagtgatgcagtctccatcttgttcttggaagactcctatctggagtcccaagccaccatagaagaatttgactacccagagtctgccacgctttgaggacaccaaaccacgtggagaggccaatcagtgaatctagataaaagatatataggaattcctaatactatgttgctcctgttggtagttctatgcttcagggccctccactttagggcaggacatgtgagtgaataagccttgaaataatcccagtctttgactatcaactcacacacagcctttgagtcttctttattgaggccctgaatattgtatagcagagagaagctatacaccctctgccctttcctacttcctgactcacagattccattaacataacaaaattcctattgtctgcatcactcagcttgaggtggtttgttactcagcaataacaacatgagccctaagacaatacaacttaataaaaccataaaattctccttaggaaacacatgagaaacttagacgtataaaccacttattttaggcccactgtaaagctgatgaaaagaaacgttatagctatagatctgcatgatataaatagctgacatgtatttgagtgttttttacatgccagatcctttatgtatgtatcaggggaaaaagtcaaaatgcctcttagagtattccggcagagggaaataagtttctactctctccccagtacttttccatttactaactattgccatgaaaattggctttctaaaaaaaaaatagatctatgaaaaggtaagcaataatttttaaaattacaatttttatataatttcacatcaaaagtttctaacataatattagaaacatatatgtactatttatccagattcactgattgcttatactttctatctttaaatacatatttttatatataaattatatgtaaattgtatatataaattatttatttatgtataagttacacataaaattatttataaataaattacattttacatatatatatatatcttcttaaactgtttaagagaaggttgaagtcatttggatatattgtacccctttattccaaatactttagtatttttttctgaaaataaaaacaaggagaggggccaagatgccctattagaagcagctacagtccatggcactcacggagaggaaaaaaaggggcgagcgaatacagcaccttgaactgaaatatccagattcttgcagtgggactgattagggaaacaatttgacccatgaagaacaaagaaaaacagggtggggtgacagcccacacagagccaagggacccccgacccccacccaaggaaagcagtgagtgattgtttgatcctgtaacaccatgcttcccccatggatctttccaacctgtgaatcagaagatcccctcgtgagctcatgccaccagaggcttgggtctgacacatagagctttgtggagccttggcagagcagcttctcaggcattcacagagacccaggagctttacatactctagccctgggaaccccaacaatcatgcctgcaactcaggcagggcaggaggtcttcacatacccctagggtagtgccagaatccagggaaccaagcagcatcattctgtgggccccatggcacctcacaagataagacccactggcctgaaattccagccggcaccagtaacacattggagccttccagagactggatggagcccccaggcagaggattgtgcaccatctctgctgtgtggttgactcagccattccagcctgtggtcttgggagagtccaaacttgggatgaggaagggtccccccagcagcgcagcacagtggctttgccagatcatggccagactgcttctttaaatgggaccctgatccattcttcctcactgagtgggacctcccagccaggctttccagcaatgccagcctgcatgcttaatggacagggctctgatttctctctaggaaggagtgcccaggagcagggagggccaccacctgggttggttggacgactcagccactgcagcctgtgggctttgaagagtctaagctgaccggggcagaagtggttccctactacaatacagatgttttgtcaaggcatggccagactgcttctttaagagggtccctaatcctattcctcctgactgggtgagacctcccaactggagtctaaatctacctcctacaggcacatgcaggccagcaataggtcaatgccttccctgggatggagcttccagaagaacgggcaggctgccaaacttgctgttttgcagccttcactggtgatatctccaggtacaggaaaagtcgaagcaactagggtctggaatggacctccagcaaaccacagcagccatacagaagactggccaaactgttaaaagaaaagcaaacagaaaacaacaacaacaacaaaaaccacaaaaaccccatccacaggtcggcaacctcgaagattgaaggtagataaacccataaagatgagcaagaatcgacacaaaaatgctgaaaattcaaaaagccagagtgctctttttccttcaagtgattgcaacacctctccagcaagggctcaaaactgggctgagactccaatggctaaaatgacagaagtaggcttcagaaagtgggtaataatggacttctgttagctaaataagcatgttgtaacccaatgccaagaagttaaaaatcatgataaaacaatacaggagctgaaagccaaaatagccagtttagagaggaacataaccaaactgctagagctgaaaaaaaaaaaaacactacaaaaacttcacaatgcagtcacaagttttaaaagaaaaatggttttttctttccatctttagtgcttccttcaggaagaaaaaaccattaccagccactacaaaaacacactgacatacacagaccagtgacactatgaagcaaccacataaacaagtctgcaaagaaacacctagaatcatgatgacaagatcaaatctacacataagaatactaaccttaaattgaaatgggctaaattgcccaattaaaaagacacagaatggcaactggacaaagaagaaagacccatttgtatgctgtcttccagagtcccatctcacatgtgaagacacacataggctagaaattaagggatgaagaaaatttaccaagaaaatggaaaaacagaaaaaagtaggcattgcaatcctagtttctgacaaaacagactttaaaccaacaaacatcaaaaaagacaaagaaggacattacataatggtaaagagttcaattcaacaaaaagagctaaatatcttaaatgtatatgcacccaatacaggagcacttagattcataaagcaagttcttagagaccttcaaagagacatagactcccatgcaataatagtggaatactttaacacatcactgacaatattagacagatcatcaagacagaaaattaactcagctctgtatcaagtgggcctgatagacatataccaacctctccaccccaaaacaacaaaatatacactcttctcattgccacatggcagttactttaaattggtcacgtaatttaaagtaaattactccttagcaaatgcaaaagaaccgaaactataacaaacaatctcagaccacagtgcaatcaaattaggacacaagattaagaaattcactcaaaaccacaaactacgtggaaactgaacaatccattcttgaatgactcttgagtgaataattatattaaggcagaaatcaagaagatcttttaaactaatgagaatgaagatacaatgtaacagaatctctgggatggacctaaagcagtgttaagaaggaagtttatagcactaaatgcctatatcaaaaaggtaggaagatctcaagttaaaaacctaacataacaactacaagaactagagaatcaagagcaaacaaaacacatagccagcagaagacaggaaataaccaagatgagagcagaaatgaaggagatagagacacaaaatccccttcaaaaaattaatgaatccaggagatgtttttctgaaaaaaaaataaaagagatagactgctagctagactaataaagaagaaaagagagaagattcaaataaagacagaaattatgagaggaatatcaccactggacccacagaaatacaaacaagcatcagagaatactataaacacttctacgtacattaactagaaaacctagaagaaatgaataaattcttccacacatatacccccccaagactgaaccaggaagaaattgaatccctaaatacaccaataatgagaactgaaattgaggcagtaaaaaataacctgccaacaaaaaagcccaggaccagacagattcacagctgaattctactagaggtacaaagaagagctggtaccatttccactgaatctattccaaaaaattgaaaaggaggtactcctacctaagtcattctatgagaccagcatcatcctgataccaaaatctggcagagacacacacaaaaaagaaaacttcaggctaatatttatgataaacatctatgcaaaaaccctcaacaaaatacttgcaaactgactccaacagcaaatcaaaaacctaatccatcatgatcaagtagacttcatccccaggatgcaagattggttcaacacatgcaggtcaataaatgtaatcaagcacataaacagaactaaagacaaaaccatgtgattatctcaatagatgcagaaaaggcatttgataaaattcaacattccttcatgataaaaaaaactctcaatgaactagatattgaaagaacatacctcaaaatataagaaccatatatgacaaacccacagccaatataatactgaatggggaaaagctggaagcattctccacgaaaactagcacaagacaaggatgccatctctcaccactcctattctacatagtattggaaattctggctcaaagaaaccactgctcaaataaatcagagatgacacaaacaaatggaaaaacattccatgctcttggataggaagaatcagtatcatgaaaatttccatactgctcaaaccaatttataaattaaatgctattaccattaaactaccattgaccttcttcatcgaattagaaaaaaaaaactattttaaaagtcatatggaaccaaaacagagcccgaatagccaagacaatccttagcaataagtacaaagctggaggcatcatgctactcaatttcaaactatattacaaggctacagtaactaacactgcatggcactggtaccaaaacagacatatagaccaatagaacagaacagagacctcagaaataacatcaaacatcaacaaccatctgatcttcaagaaacctggtaaaaatgagcaatgaggaaagtattcctgatatggtttgactgtatccccaacccaaatctcatcttgaattgtagctcccacaattcccatgtgttgtggaaggaacctagtcgagggtaattgaatcctgcaggcaggtctttcctgtgctgttctcatgatagtgaataagtctcatgagagctaatggtttttataagaggaagtttccctgcacaaattctctcttgcctgctgctatgtaagacaagactttgcttttcctttgccttccgccatgattgtgaggcctccccagccatgtggaactgtgagtctattaaacctctttccttcataaattatccagtctcaggtatttgttcatagcagtgtgaaaataaactaatgcaatttcctattaaataaatggtgctgagataactggttagccatatgcagaaaactgaaacagaaccccttccttacaccacaaacaaagatcaactcaatattgattaaagtcttaaatgtaaaacacaaaactataaaaaccataaaataaaacctaggcaataccattcaggacataggaacgggcaaacatttcatgatgaagacaccaaaagcaattgcaacagaagcaaaaattgacaaatgggatataattaaactaaagagcttctgcacagtgaaagaaactatcatcagagtaaacagacaacctaaagaatgagagaaaattttttcaatctacccatctgacaaaggtctaatatccagcatctacaaggaacttacataatggtaaagggatcaatgcaacaagaagagctaactatcctaaatatatatgcacccaatacaggagcacacagattcataaagcaagtccttagagacctacaaagagacttagactcccacacaataatagtgggagactttaacaccccactgtcaatattagacagataaacaagacagaaaattaataagcatatccaggacttgaactcagctctggaccaaggagacctaatagatatctatagaattcttgacctcaaataaagagaatatacattcttctcagcaccacacagcacttattctaacataaaccacataattggaagtaaatcactcctcagcaaatgcaaaaaactgaaatcataacagtctctcagaccccagtacaagcaaattagaattcaggattaagaaactcactgaaaaccgtacaactacatggaaagtggacaacctgctcctgaatgactactgggtaaataatgaaattaaggcagaaataaataagttctttgaaaccaatatgataggagaacaatgagaacaaagatgcaacataccagaatctctgggacacatctaaagagatgtttagagggaaatttatagtactaaatgcccacaggagaaagcaggaaagatctaaaatcaacaccctaacatcacaattaaaagaactagcaaagcaagagcaaaccaattcaaaagctagcagaagacaagaaataactaggatcagagcaaaactgaaggagatagagacaagaaaaacccttcaaaaatcaatgaatccaggagctgggtttttgaaaagatcaacaaaatagatagaccgctacccagactaataaagaagaaaagagagaagaatcaaatagacacaataaaaaatgataaaggggagatcaccactgatcccacagaaatacaaactaccatcagagaatactataaacacctctatgcaaataaactagaaaatctagaagaaatagatacattcctggacacatacaccctcccaagactaaaccaggaagaagtcaaatccctgaatagaccaataacaagttctgaaattgagacagtaattaatagcctaccaatcaaaaaaagcccaggaccatatggattcacagctgaattctaccagaggtacaaagagtagctggtagcattccttctgaaacttttccaaacaatagaaaaagagggactcctccctaactcattttatgaggccaacatcatgctgataccaaaacctggcaaagacacacacacacacacacacacacacacacacacacacacacacaaagaaaatttcaggcaaatatccctgataaacattgatgtgaaaatcctcaaaatactggcaaaccaaatccagcagcacatcaaaaagcttatccacaatgatcaagtcagcttcatccctgggatgcaaggctggttcaatatatgcaatcaataaatgtcatccatcacataaacagaaccaatgacaaaaaccacatgattttctcaataaatacagaaaaggacttcgataaaattcaacacctcttcacgctaaaaacactcaatgaactaggtattgatggaatgcatctcaaaataacaagagctatttatgacaaacccacagccaatatcatactgaatgggcaaaagctggaagcattccctttgaaaaccagcacaagacaaggataccctctgtcaccactcctattcaacatagtattggaagttctggccacagcaatcaggcaagaaaaaaaataaagggtattcaaataggaagagaggaagtcaaattgtctctgtttgcagatgacatgattgtatattgagaaaaccccattgtctcagcccaaaatctccttaagcagataagcaacttcagcaaaatctcagaacacaaaatcaatgtgtaaaaatcacaagcattcctattcaccaataatagaaaaacagagagccaaatcatgagtaaactcccattcacaattgctacaaggagaataaaatacctaggaatacaattaacaagggatgtgaagaaacttttcaaggagaactacaaaccacttctcaaggaaataagagaggacacaaacaaatggaaaaacattccatgctcatggatggaaaaaatcagtatcatgaaaatggccatactgctgaaagtaatttatggattcaatgctattcccatcaagctaccattgactttcttcacagaattaggaaaaactactttaaatttcatgtagaaccagaaagagcccatatggccaagacaatcctaagcaaaaagaacaaagctagaggcatcatgctacctaacttcaaactatactacaaggctacagtaaccaaaacagcatggtactggtaccaaaacagatatatagaccgatggaacagaacagagaactcagaaataacgccacacatctaaaaccatctgatctttgacaaacctgacaaaaacaagaaatggggaaaggattccctatttaataaatggtgttgggaaaactggctagccatatgaagaaaattgaaactgaaccccttccttacaccttataagaaaattaactcaagatggattaaagacttaaatgtaagacctaaaaccgtaacaaccctagaagaaaacctaggcaataccattcaggacataggcatggccaagacttcatgattaaaacaccaaaagcaatggcaataaaagccaaaattgacaaaagtgatctaaataaactaaagagtttctgcacagcaaaagaaactatcatcaaagtgaacaggcaacctatagaatgggagaaaaattttgcaatctatccatctgacaaagagctaatatccagaatctacaaggaacttaaacaagtttacaagaaaaaaacaaacaaccccatcaaaaagtgggcaaatgatatgaacatacacttctcaaaagaagacatttatgtggccaacaaacatatgaaaaaagctcatcatcactggtcattagagaaatgcatatcaaaaccacaatgagataccatctcacaccagttataatggagatcattaaaaagtcaggaaacaacagatgctggagaggatgtggagaaataggaatgcttttacactgttggtgggagggtaaattagttcaatcatcgtggaagacagtgtggtgattcctcaagtttctagaaccagaaataccatttgacccagcaatcccattacggagtatatacccaaagaattgtaaatcattctactatgaagacacatgcatatgtatgtttattgcagcactattcacagtagcaaagtcttggaaccaacccaaatgcccatcaatgatagactggataaagaaaatgtggcacatatacaccatggaatactatgcagccataaaagaggatgagttcatgttcttcgcagggatgtggatgaagctggaaaccaccattctcagcaaactaacacaggaacagaaaaccaaacaccgcatgttctccctcataagtgggagttgaacaatgagaacatatggacacagggaggggaacatcacacactggggccttttgtgggggtgagtggctaagggagcgatagcattaggagaaatacctaatgtagataacgggttgataggtgcagcaaaccaccatggcacatgtatacctatgtaacaaacctgcacattctccacatgtatcccacaacttaaatataataaaaaaattgacccctttatcattacatagtgaccatttttgtatcttcttatagatttgtcatgaaatctattttttcttatataagtatagtgactcctgcacgtttttgtttccattggcctcaagtatcttttctagccctttattttcaatctatgtgtgtctcagttaagcttttattgtcaaaattgtttcagaagcacttttactatataaatctttgttcctcaattttctcttcatgtgcctgtcaacatcataatcagtctttaattaatgagatgaataaaatgtttaactgtcatttatttatgatttgtatgagagtcatacttttaactttttaaacattatattttagtaggaatttttacatcaaaaactcatcacgtcctttaatcaaaactgctttaccttttactttttatgctttgtaatacttttttgctttattacattgttttgaactcttgtacaataaaatattctgtctttatattttttccagtactttttgaatgtgtttgggattggtgctgcatatgtttaagtgagatggaactgcacgatttgttttttaaaaatcttcttaacttgtccttttagtcaaaaacccaagctatccctgccttgcccccagatccttttctcacagaataatctaagagttttgagaaacagagaaatttatttctgtacattgcagagcaacagaaatctgggatttgttaccaggatcttgatagtgaatgtattagttcattttgtattgctataacagaataccacaaactgagtaatttataaaatatatatataaaaatctatatatatatatgaaatatatatatcttacaattctgaagctgggaagtccaatctcaaggggcttataactggtgaaggtcttcttactatgccatctgtagaataacaatacagcacttgtaagagagcaaaagaacaagagggggctgaacttgcttttataacaaggccactttcttgaaaattaatccactcctgcaataacccattcctgtaataacccaatcctaaaatagcattaatccattcaggggggcaaatctctcattacctaatcacttatttggcctcacctcccaacactgttgcattgggattaaatttgcaaaacataaactttatgggatatagtcaaaccatagcagtgagactcaaaaataacaataaaaatattcaggaaatagtgatatctaacttgcactagaccttttctcttttgggcaaaaattacccatcattcccccaaattttcccatgcattttggttatacacgacagtgttttgatggatttgtattgaagaataatgaagatattattttccatgcttagaatgatgtagacaacataacagttgcaggaagtaagatgacatcaggtatcaaaaaacatattgtaataataatttggaggtggtaggtatcaggagaacagaaattctttcacatacatccccacccccctccacacacacatatacacacagagagctactcttctcataaattctcgaaatattgcagagcctggtgatagtccaacaatatagaaaaatagaaggataaagtcaaattgcttcaatattaaaggaaagtgtgaatccagaaaagtggagaatgtgtagattttggggttatgcatatatcatctcatacagcctcaacattattatcttaaatttcatatattagaagtttaggctaacagaaatggttatcgaataggaaatgcaaatagccaaaagacatatgctcattctcactattaacaatgtgaatacaagttgagataccatgttatatttctcacgttcactaaattaaatgcaaaataccagatataagtgaggaggtggaagaagaggaccttgtttcttggaccataaattggtatagcctttaggagataagtttgaagatatctaatgtatttgaggatatgtataatctgagactctgcaagtctacttttaaagtgtacaacccagagaacagtcatacacgtgaagcattcttactgtagcttttttttgtaatacttaaagactgaaaaaatattctaatgtccatcagtagaagaatgatccaataaacagttacagtcatacaatgaaatatcataaaacaataagaaaagaatgaactagaactacatttgttacatggcaaaatctcaaaaccatagcatgttgaaaagtttcagaaggatatctgtgtgtgtacaacagaacatttatgtaaaatgcaaaaatgcaagactactaattaaatattttatgtgtacatatttattttaaatgtgtacttcatcaacaaatgaatgaataaagaaaatataccaatattccattggtatatatacacaatggagtactattcagccttaaacaaaagaaggaaatcctgccatttgtagcaacatagaaaaaccttgttccttggagcataaattgaagtgaaataagccataaattggagtgaaataggcataaattggagtgaattggggtaaaataagccaggtgcagaaaaacaaataccacatgatctcacatatatgtacaatctaatgaagttgaactcagaaatagaaagtaaaatagtggtcaccacaggctggggggtgggaaaattgagaaaatgttggtcaaaagaaacaaaattttagtttgacaaaagaaataagttcaagagacctattatccatcatggtaactacagtttataacaatatatagcatacttaaaaattgttttgaaagtagattttaagtttacccaccaccaaaatggtatattaggtaatgcctatgttaaatagcttgatttagccattccacaatgcatatatatgtatatatacacatatacacatatatatcaaaacatgctgtacatcatagatatatacaatttttatttgtcaattttaaaatacataaatgtgaggggacatcagcaagacagcaaaataggatgctatagaccctctttcccctagagagaccctgagttaacaacaatatagggaccagaataactgagaactctagagactagttaggaagctatggaacccaggttattgtaaaacccagaagggattccagtgaaaggggtagaaaaaatcattgcattttgtgcacctgtttctgtccctcaccctatgttacatagcacagagcaataaggagaaaatccctcatgtctgggctcctccctcaggagaaaaacaaaagagtgcataaaatgttctaacttcccttggggcttcctaaggaaaggtttttctgtcttgcctgatttggagtgctgatgggacagcagcagagtttggaagccactgaagaaaggggtaagcagtgcattagagctgcagttctacagttaaatgccaggagatccaagagattggaaagttctgagaggtcctggaacctccaaccaggctgactggtgaagatctttccctgcacaaagccaataccacaaagattaggagaggtggctttttttttttcttcaaaatgcccaaatcccaacaaaaaataacaaagcatataaagaaacaggtaaaagtggcccaatcaaaggaacaaaataaaactccagaaaccaacactaaagaaatgtgtaccaaggggctactcaaaaaaagaatttaaaataactgtcataaagatgctcaatgatccaaaagagaacagatagacaactaaatgaaattagaaaaatgattagtaaactgagaatatcaataaagagaaactctaagaaaggaccaaataaaaattctggtttaaaaatataataactaaactaaaaaattaaaagggttcaacagcagacataatcaagcagaatcaagtccagtaacttaaagacaatttatttgacatcattgagccaaagggcaaatgagaaaagagaatgaagaaaagcaaaatagcctaagagacttatgggacactatcaagctgggcaatatatgcattataggggcaacagagggagaagagagggggaaaaaaagaagcatagagcgtattaggagacatattgggataaaactcccaaatctgaaaaaagaaaaagattcaacaggttcaaaactgtgataaaaccaaagagaatcacatccagatactttataatcaaactgtcttaagtcaaagagggagaatcttgaaagcaacaagagaaaagtgatttgtaacatacaagggagccccaagcatggaggttttgtatgcaattgaagttaagttgttatcagtttaaaacagacaattacaaatatgaaaggttttatgtataccccatgataaccatggagaaaaaacctacagaagatacataaaagaaaaagaaaggagttaaagtatatcaataccaaaaaaaaaaaaaaagacgaagacagcaagcgaggaaaagagggacaaaaactccatgatagtgagaaaacattatgatattggcaataataagtccttagactcgctttagatttaaagacacacatacactgaaagtaagagaaacagataaatgagggtgtcacaactacaaatttggtaaaggatagtctcttcaacaaatagttttggaagaactgaatatatacttgcaaaggaataaaactggacccttaacataccccatacacaaaaatcaactcaaaattgattaaagatttaaatgtaaagcctgaaagtataaaactcccacaacaaaacataaggggaagtcttcatgacactggtcttggcaatgacttcttcgatatgaaataaagcacaggcaactaaaacaaaaatagatcagtgccatttcatcatgaaaaaaagcctctgaacaccaaagaaaacaatcaacagagtgaaaagacaacctacagaatggaaaaaaatgtttgaaaaccatgtatctgaaaagaagttaatatccaaagtatataaagaacacatataaataaatagcaaaaaaccaagtgaccttatttttaaaatatgggcaatggacttgaataaccatttctccaaaaagcgcctattggttgacaggtaaattaaaagataatcaacattactaataatcagggaaatgcaaatcaaaaccacaatgagttgtcacctcacacctgttaggatggtaacatgatttggctctgtgtccccacccgaatctcactttgaattgtaataatccacacgtgttaagggcgggaccaggtgaaggtaattggatcatgggggtggtttctcccatgatgttctcatgataatgagtgagtcttatgagatctgatggttttataagcatctggcatttcccctgcttgcactcactctgtcctgccaccctctgaacaaggtgcttgcttctcctttgccttccaccatgattgtaagtttcctcaggtatccccagcaatgtgaaattgagagtcaattaaacctctttccttcataagttacccagtctcaggtatttcttcatagcagtgtgagaatggactaatatggatggccattatttaaaaaattacaactattggcaaggatgtaattggtgaaaacataaaatgattcagtcactatggaaaacagtatggagtttcctcaaaaaattcagtaatcccacttctgggtatatatccaaaagtgttgaaatcaggatctcaaagagatacatgcaatcccatgttgactgctgtattatttacaatagccaagatatggaaattacttaaacattcatagatgcatgaatgaataaaaaatattgtatatacatacaatggaatactattcagctataaaaagaaggaaatcatactatatgaacctggaaaacattatgctaagtgaaaaaagccaatcacagaagaattaacactgtatacttccacttctatgaggtacctcaaaaagtcaacctcatagaaacaaagagtagtttggtggttgccacgcgctgaggagaggagcaattggggaatttctgttcaattagtataaagcttcaattatacaagacaaataagttttaggatcctgctgtactacactgtgcttatagttaacaatattacattatgcacttaaaaattctgataagagaacttaacatgcaatatacatttttatgacattaaacacacacacacacacacacacacacacacacacacacacacacctcaacaaagtccaggactaaatgacttcactggagaattttgtcaaacatttaaaagaaaagtccttccttcaggagctcttttagggcaggcctggtggtgacaaaatttctcagcatttgcttgtctgtaaagtattttatttctccttcacttatgaagcttagtttggctggatatgaaattctgggttgaaaattcttctctttaagaatgttgaatattggcccccactctcttctggcttgtagagtttctgccgagagatccgctgttactctgatgggcttccctttgtgggtaacccgacctttctctctggctgcccttaacattttttccttcatttcaactttggtgaatctgacaattatgtgtcttggagttgctcttctcgaggagtatctttttggcgttctctgtatttcctgaatctgaatgttggcctgccttgctagattggggaagttctcctgtaaactagttcaacccttgtggaagtcagtgtggcgattcctcagggatctagaactagaaataccatttgacccagccatcccattactgggtatatacccaaaggactataaatcatgctgctataaagacacatgcacacgtatgcttattgcggcactattcacaatagcaaacatttggaaccaacccaaatgtccaacaatgatagactggattaagaaattgtggcacatatacacatggaatactatgcagccataaaaaaatgatgagttcatgtcctttgtagggacatggatgaaattggaaatcatcattctcagtaaactatcgcaagaacaaaaaaccaaacactgtatattctcactcataggtgggaattgaacaatgagaacacatggacacaggaagaggaacatcacactctgaggactgttgtggggtgggggaggggggagggatagctttaggagatatacctaatgctaaatgacgtgttaatgggtgcagcacaccagcatggcacatgtatacatatgtaactaacctgcacattgtgcacatgtaccctaaaacttaaagtataataataataaaataaaaaaaaagaaaagttaacaccaatcctcccaaaactcttccaaaaagttgataagaagggaatactttcaaactcattctactaatccagtgttagccatgatacaaaagccagaaaaagatactacaagaaaagaaaacttttcagaccaatatccctgatgaagattgatgaaaaatattcaacaaagtattagaaaattgaattctacaatacttcaaaagcattatataccatgaccaagtaagattaattcctggaatgcaaagatgttgcaatatgcaaaaattaataaatgtaatacaccacgtttgcagaatgaaggacaaaaaccaaaaccacatggtcatctcaattgatgcagaacaaaagtattcgacaagattctacacccttaattaaaaaacttcataaaaaagaaatagaaaaaaaatgacttaaatataatactctttatgaaaagcccaaagatttttactttttttggataatactcgatgatgaagaccgaaagcttttcttccaagatgaggaacaaggcaaagatgactgctatcaaaacttctatgccacatagtcttggaagtcctagcatgaaaaattaggcaatgaaaataaacaaaagtcacccaaactggagaagagaaagtaaaattatctttgtgcacagatgacacgatctcatatgtagaaaatcttaaagattccacagaaagcctgaattcagcaaagttacagggtacaaaatcaacatacaaaaatcaattttgtttctatacactaacaatgaataatctgaaaagaaaattaataaaacaattccatttgtaataccatcaagaataaaatacttaggaataaacttaaccaaggtggtgaaagacatgtacactgaaaacaataagacattgatgaaattaaagaaatcaaagaaatggaaagacaaatccattctcatgaattggatcttattatttttcaaatgtgcataatacccaaaatgatctatagatttaacacaattcctgtcaaaatccaactgtcatttttccagaaaaagaaaaattcttcctaaaattcatatggaatctcaatagacttaaaataaccaaaacaatttttaaaaagaacaaaattgaagggctcacacttcctgatttcaaaacttattataaagccacaataatcaaaacagtgtggtactggtataaagacggacaaatagatgaataaaatagaacagagaccccataaaaaaaacccttgcatatacaatgagatgggatctggtgcattctgagtggtatggccatagtccatagtcctttttttttttttttttttttttttttttttttgaggtaaggccttactgtgttgcccaggctggtctcaaacttctaggctcaattgatactcctacttcagccttctgaatagctaggcttacaggaacacaacactgcagcagcttagatggtcaaatggtcttcaacaagggtgccaataccactcaatgggaaaagaacagtctcttccacaaatggttagaggaaacactttcagtcccatccagttaggaaaactgtatatctacatgcaaaagaatgaagttgaacacttatcttacagaatgtacaaaaattaactttaaaatggattaaagacataagcataagacctaaaactataaaattcctagaagaaaacaagggaaaagctgtatggcattggacttggtgatgatatcattgatatgacaccaaaagcatacacggcaaaagcaaaattaaactaataggactatataaaacttaaaatattttgtgcagcaatggacacaatcagccaggtgtggtagcacttgtctatagtcccaactactcgggaggctgaggcaaaaggctgaggcaggaagatcagcctgtagtgaattatgccaatcaagtgtccacactaagttcagcattaatctggtgaactcctgggagcagggtatcaccaggttacctaaaaaagagggaacttgcccaacttggaaatgaagcatgtcaaaactcccatcctgatcagtagtgggattgtgcctgcatatagccactgcactccaacctaggcaacacagcaagacctggtccattgcaaaataaacaaaaaagacacaatcaacaggtggaaaggcaacctacagaatgggagaataggataaattattcgtgaaccatatatccgattaggggttaatatccagaatatataaaaaaactcactcctacaacttaataaaaaagtcaaataacctgatttaaaacaggcaaaaaaacttgaataaatgtatctccaaagatgacatacaaatggccaacaagcatatgagaagatgctcaacatcagtaatcatcagaaaaatgcaaatcaaaaccacaatgagatattacctcacactgcttagaatagctattatcaaaaagacaaaagataccaagtgttgacaaggatgtggaaaaattggtatccttgttcactgttagtgggattgtaaaatgatgcaattgctatggtaaacagtatggagtttccccataaaatcataaatacaagtaccatatgatccagcaatccaacttctaggtatacactcaaaaaaattcaaagaagaatctcaaaaagatatttgcatacccatgtttatagcagcactattcatagtagctgagttagaagcagtccaaatgtccatcaagggatgaatagataaacaaaacatgatatatatctagaatagaatattactcagcctaagaaaggaaggaaattctgtcacatgatatatcatggatgaaccattagtatattatgctaggcgaaataagccattcacaaaaagacaaatactgtataattccacgtacatgaggtatttaaagtaatcaaatttatataaacaaaaagtagaatggtggttactggggctggggaaaaggcaaaaaggggagttgtttaatgggtgtagaatttcagacttgctagatgaaaaagtcatggagatctgttttatatcaatgtgaatatacttaatactactgaagtatacagttaaacatggttaattttgctaattttgttttttaccataataaaaaaaagtataaagtcctgcatgggatggatatattacaactccagggtagctttttcagtggaggataggaggtgaatgaaattagggcagggcaactttatttattataaataaatctgaatcaaataataaaaacgttaatattttcaaacatggatgaagagtacgtaagcatttactatattatatcctacagttttttgcttgaaatataactatgcaaacattcttttcaatcttgaaatttatgaaaatgtattgtccaagttttcacaaatagtaaaagaaagatttgaatttgtctgcctaattttaaattccttaaaagaaactcctattctgaactaatgattgactaaattactgagagcacctaaaaaggtagtctgatttttcttctctatttatctagtaacagcagcattttccaccatgcctccaacctagagagttgattaccagctaaatgaattatgtttgttggaaatcctcagtttccaaactaatttcttgccaattcctacttgcacacgatatatcatttttatctttgctctatacttactatttagctatctatttatgatatactaaatgcctagaagtttcccctatatttttcattcctcaaatatagatccctgcaaatctcaagcttaattgaatatgtacatagaatagtcaagttaggcaatcatgttgacataggaacatgcccaggagttgagagtgaaaaccactcttcatcttctgtgcactatatgctttgattccactgaatagtgatctacttgtaagtgctgattttgaggaatcatcattatttctagattttattgcttatcacttggcattggccatactattatgtcagatcatttatcaaccacactaaagttataaagttattgactacacagtttagttttggcttattttactaaatatttaataaattccttttttagagacaaaaattcaattcttcaaagtaatctatgtttattatgtaccaaataagagaattctatttggctccattgacttaaagaaatctaatgtaagtctttatctaatactaacagtgatctcattttccatggtccatatccagaaataatttttactgataaggaacattgggatttctgtgaaactaattctgtatctgtcattatcattaatttatttgtattgcctaagtttaattgtgtcaatattccctaaatgatttttattagaatttcacctaggtcctacactttccttattaaatatatatgtatgtttgtgtgtgtgtgtatatgtacatgtgcgtatatatatatgtgtgtgtgtgtgtgtgtatgcatatatatagaatgaagtccagataaaacagtgaattttattcccttatatcatttaatattttatatttttctcatcactacaataatattttatattttatatttttctcgtcactacaaataaaaattatttatgtatcaatgttctaatttattctaattatttattctatctattttctacttattttagaagataatctctcattttttatgattaaggtttcctggattgtttagtatgaatataatccctttctttgagatttagatgtactacacaagtgtatgttttctcaatcttaaaatgttttcaattttctagtgtatttatccaaatgcctcttatgttactatcatgcattaatttggaaaacttggtcactgatatgatataccttagcttagtgaaagagcttcattattattcaacaagtagaaaattttagtgtatttacattcttatgtttagttactgctatttctgtgtttagatgggactgttattgacacatattacattacatttcaaataaacattctttatatgtaaaagttatatcatacatgaaatgtaatatttttgcaaaattggacatccttcttcagaaacaaaaattgagttaaaggaaaagttaactttgaaaagctgtttaatactccaatgcaagcaaccaagaactaatcatttttacaattaaatatcttcaatatgtatttttatatgagtcactagggaagtagaagtgcatagcaacaaggagatcaatgggagtaaaaaggagaaaaagaaagggcagagaactttgttagaagtaaaaataaattaggtgtcgaattaaagcacttagatggaaaatgcacgttaaaaaaaaatcgtttgccttgacttattctagaagttaaggaagaagtaggttgtttagagttgtactacctaattatcttaatattcatttaagttcatctcctcactttgatataaggtttttaaaggatgatacaacagatataaggcgcccattccagaaacaagctattatctgcagtaggccccagtgtcttcagagccccataatactattctttgaccccgacaccagagtcaatccacaaaagtcaaattacaccacagatttcagggaaaagttataattatgttctgttatgccaacctggccgtgaaaaataactaaagtattgggaaggaaggcagaggtcaaaagtgagctgttaagagaacaaaattaggcatttactaaaaagctattcactaactctaaattaggagcgggaaccactgcaggcatgcatgtgtgcaacattcaataccttttttttttttttaatcaaatggactctgaaaaatttacccaattatctaaatcttggcattcatagagttttcccattggcctctagcaatgcaattttgttttgacgtgattcagcctggagaaaaatgtgttcccatgacactggtgttgattgcagctgtttgatgattgttacaagtgtatctcaatgttctctcacaaatgtatgtgatactgccagttctgcagctctagtgttcaacatacccggatggtgtttaaatgttcctccatctgacagagtggtgctgatgcaatctgttaaaaattgtgactactctgccaagtatttgacagatttctctgagaaacctccaggatatccatctagcctcaactgacatccaaggctgtcttgttgccagtgccttcatcaagtggcatggatttctgacaggacaatgatccatagcagatttcttctgactagagaagaaacccctcaaatagagataatcacggcattttgttaaattagactaactcaacaacataggaagagaatcaaggcaagagcataatttgaaaagaagctttagtgattctttccatatctgagacctagttattctaaaataaatgacactcaaaattcttaaacagaaaacaagtaaaccacataatgtttttgttttcagaacttactttgatatatgcatttaaaataaaatagatttccattcttatttcacaaaacctgattcagaaaaccccctttattactgtcggtttataaatgcacttctgtatacaattctgtgtgtatatccatgtaagtttcagatgtaagcctttttcaaacagatggttcttgctgttaaagtgtataaattatgaatttgacaaagcagagcatttaaaaacactactataggaaggaatcaaatctttagaaaattaacaaaaatgacatagaaataagccttttttcattaactgatcaatctaactattcagactccagtcactaaacaagaaccatgactgaaaacagagaagtctcttatctttgcttcctggctttatagcaaatcccatgtttttgagttttaattgttcatcaatgatatgtttccaaatttaatctacttcttggcagtagaatcagcaaaacatttgttccctttcttctggatacggctgcaatcaattggatgcacaaatggcataaaggatgctatagggaatatctgccccttcacgaaatgggatagatgtttggatgatggtagtttcaaaagaaacaaaactgaaagtcagagcaaaaaagttaatcaagccaacactcttcaagtatacaactgaaaatacatatttgtcccaattcttaatgatttaagtattcccacatattcataaactctgttaaaggacatgccaaagttaaagtcactggtaatataataaccatttgttaaatgggtaggtgagtaggaacacaaagaatgattatacattgtcatttatccattaaaagcatttacaaaatctgtaagccattaggatgatagctcagtactaatgctgagagaataattttgcttaaaattcagatatgtaggtttatgatagttcggacttactaactatcccaaatactatttttgtatcaaattccttatagtgataaaaaattatgaaaagtgagaatacaaaaaaaaacaataaaattagagatagttcccagaaaagtaattgtttagtacaattatagaaggaactccatagctacagttgaataacagcaacaaccagagatgaggaagtaattgtatatctaggtgtgaggaataaaacaatgaagtttctagataacaaacatatgaggttatcggcatgactttgggataggagagaatttcttaagtgggaatcataaatcattaactataagtagtaagaatgataattggattacagtataattaagaaattctattcaacaaaagacaccattaagagagtaaaaggcaaaccgagagtggaagagatatttgcaatataacaagaggctcattttcaagatatatcaaaacacttacaaataaaaaaagacaacccaacagaaaaacgggtaagaatcatgaacaggcacttttcaagatatgatattgaaatgaccaataaacattggaaaaggtgttcaaccttattggtcatcagggaaatgcaaatttataccacaaattcaagtcataacaaacccacttgctcagcaaaacttataatgactccaaaaagattccaagcattgctgcagaattttcatacactgctagcgagagtataaaaaacattttaaaatctagattggcattatctactacagttgaagatactgtgtattctgtggcccatcaattccactcatgcaccaaatacatgtattaggttggtgcaaacgtaattgcagttattgcaattagactattcttgattttcttgtatttttttgtaagtggttaatgccacttttaatggtgaaagccacagttacttttgtaccaacctaataaaataaagagtagcattgtttgaaatagctaaagatggaaaacaatccaaatgttcactaatagtaaaatggataaataacttgtggagtattcatgcaattgaatactattgagcaatgaaaataaactacagctatttgcaacaacatagatgagtcttataaacataatgtagaacaaaaaaaggagcaagacaaaaaagagcatatacaatatgataactttcatataaatttttttaagacagggtctcaccttgttgcccaggctggagtaccatggcgtggtcacagctcactgcaacctcgacctcccaggctcaagcaatcttctcacctctgcatcccaagtagctgggactacttgggatgcatgccatcccaaggtgcgtgccatcatgcccacctaatttattttatatatttttgtagagacaggggtcttactatgtaacccaggctggttttgaactcttgggctcaaatgatcttcccacctgaggctcccaaaatgctgagattacaggtatgagtttctgtgccctgcccatataaagtttaatatgggcaaatctaaactataaaattctagggagacatatattagtggcaagtctataaagaaaagcaaagaaataactatcagaaaaaccacaataacaattacttcttgcggggagggaaggggttataatcagattggggcacatagggattttctgtgtggctggcaatgttctatttcctgactttggtggtagttgcattgaaattcactttatgattcactcatctaacttcatttatgttttatggaattttaatatgtatatcatatttcacaataaaatgtgtttaaaaggtaaaaggcaattcagtaaaagttggaaaactgtgaagtttataaatatacttctacaagattattttcaattgtgttaatgttacgcaaatggtacttgttttggaaaaattgatagtggcatacatagattcagaaagcgggatctcaaactatttagcagaacagaagaagaaatgctttagaaaaccatgataaatgaccaaaaagtggctgtaacgatgatagactgatatcaaagatatatatgcagaattacaataacgttatttcatgaagtaaaatgcattttaatatcttttatatgaaatgtgattttaacagtcatgcctaaccaaattaataaattaaatgtatgtttaaaaaacctgatcaaagattaagaagccagcaagtggaattctatttttcacccatctctctagtctaatctgttcaaacttcactgaagtaaaagcctgctgctcttgtttcatttttaggccatcattgctcttatttttccttgcctggaaatcaccctttccctccctgacccccaactcctccttctccacctttttcaacttcaactgagacactgcatcctccacttactctacttacttattttagcctttgcttcatatttatatttacacatattttagcctttactttatatttagtgctgatctcacatcaccaagtaggttgttagatttattttatataatttactcataccatacagaagttcttctcaacccagtaacagttctgaaagaagtacctggggagttttatgtttgtttaaaatatagatcccacagaatgacacccagattttcttattcagaaggtctgtactggagctcaagaatcttcatttttgaaacagctcaccattgattctgatatgcagtcaagattgagaatggcaccatggttcctagcatgtgagtagactgaatcattatacaggaagctaaataaatgtttattactcgagtgatgaaacacagagtataatctgtagaagttttattccttaccaaatatagtttcatagaatgaatttatgtttcatcttaaagatgagcaaactaactcatggaaaggttaagtattttgtccaatgtcataaaaatagtgaactagtgtcaattatagagctataaaagattttcttaatcctgctcaaaggctctttctaccacactagatttttcaatgccaatggtggaattccaatgaaatacagtactacacaaaataattaattcaaaaatatactctaaaagttccatcacttatcaggcacatcaaatgttgctgcatttggttagaatggtctgtaaattaccatacctctgccatctattaaacatttttgctatgatctagtgagatttgcccttggaaaaaaatacttttttttttctagtcaagtgaagcagtgggagtggagaagccttggaaaatttaatgattaaaactgatgatagaatcctcctaaacttgttataaagaattagatacataatatattttgcaatgataccaaatgttccaatatttaatacagatttgataaaatttttaaaatattttttaaaaaacggtattttatactataagcctttccttcttgctgattactttttgaatagggaatttttatgtctctattcattatttctaattgctctgatatttttgcaatcatgttctatttcctatccaaaatattcattagtattaactagcacttctgatataaccattcttcaactgaagatgatgccacaacaatttagattatgatctaaagtaaattatcattttataaatggaatattcacctgtccttctttacctactctcctttaatttgcttattcctcacttctaattcattcctctcaatatcatcacctttaataaacacacccctcacctactttatgatgaccaacaaggtgatctcgtctttataatgccaagagagtgatgctagaatattatgagcataggccataatttcaaatattctgtgattactaacaaattaattggccgagtaaaaccaattaaaaataaatgcttaacttatatagacaaacacactcaaccatattttcattgcatacagaaattaaataagattttgatttaaaaacatttaatttgttagaaacccatgtgctaggaaattttaaaacacacatcatattatatttaagaagtcaggactggaatatttaaataaaagatttcctccagacttaactaggctctcaattcattaagcagcacatgttttacgaattgtaaaatcaagcaaattgattttatgttaagaataagcaataataggtagttgattaatatatgcaaagaagtaatcaaccagtatatacaaggtattatgctaagtactatgagggatacatagccacttgcctccaagtggctaaataattacgggaaaaaatgtataatgggatggatgctgctaagagatttttattattatgcagcctcctttatatctagagcactggttctcaaccagggccagttttaatactccggggacctttggcaatatttacagacacttttagatgtcacaactggagaatgggtgggcattgctatacaatggctatacaatagaatgttgttaaacattctataatgcacagagcagcctcaccaccaacaaacagttaacaagcacaaaatgtcaatagcgttaaagttgaaaaacccagatctagaggcggagacagaaaattactttgggatcaaattcttgttattaagggaaaactcagttgagctacctcctttagtcatataaatataaggccagtaggtacatcagtaggctgagtatgtcatgttgctacatctggaattgcctttggacctagtcaccaccatagaatgacatgctttgagaacaatgaggaaacacataggggaggctaaaagagatgttagcactagcaaacatgtgactgagcaagcgcatcactgcagtagtgtatattcaattggttggcaggaccaacgggttatgcagactgacaatatgtagacagtactaaaacagcaagactagtaaattttctagttctttatatctacagttaagtatcgcttaatgacagggatacattctgagagatgcatccctaggtgatgcagggacatcataaaaatgcattgctgggaaattttgtcattgtgcaaacgtcatagaaagtacttttacaaatctagatagtatagactactacacatctaggttatattgtatagcctgttgcccctgggctataaacctgtacagaatgtcacctactgaatactgtagccaactgtaacataatggtaagtatttatatgtctaaacatatctaaacatagaaaagaaaaagtaaaaatgcagtattaaaatcttatgggaccactgttgtatatgtggtctgttattgaccaaaacgtcattatgcagtgcaagactgtatttggctttcggaagcaggagtgctttgattagtcgatagtcttcatggatgaatcactggagaaagaggcttcttgaaggagataataaactttgtataaagacaggtgagcaattaagtataagaaagaaatgtatgggccaggcacggtggctcacgcctgtaatcccagcactttgggaagccgaggcaggcggatcatgaggtcaggagtttgaggccaccctggccaacatagtgaaaccctatctctactaaaaatacaaacaaattagccgtgcgtggtggtgggcgcctgtaatcccagctacttgggaggctgaggcagggagaatcgcttgaacctaggaggcggaggttgcagtgagccaagatcacgccactgcactccagcccgggcaacagtacgacactctgtctcaaaaaaaaaaaaaaatagaaataaagaagtgtatgaagcatactgtattggtgcaccaagctggcaaagcaagttatatgttgttgcaaatgttgttgttgattcattaagagacttggccattatacctattccccaccattctgtgagtgttggctgctaatagctcatagctacctctgttcttgagataattgcccttggctgacagaaactgtgccacctgggatgttatgcagtctgtctcactaggttattggcatagggtgcataacctcccaggggtacaaaaggtctgggacccttgtctcagagagagacaattctatgccgagatttatgctccagaacttttgaatcccaccctactccacccctcaagaccctctcctgaggatcaagtgaaagctagactttacctgagaccacatccttgctcgtttttttccccttccctatcctgcttccctttctttcttcaggtgtttcattaagagcttttgctcaataaattattttcatgccaaattcctgtttgagactctgcttttaggaaagctgatttacaacacacatgaaatcaagaaactaaaatagaatgtagaatatgacagtctgtagagaaagattcatgttctgatcaactcccacttatgagtgagacatggacacggggaggggaacatcacacaccggcgcctgtcagggggtggggggctaagggaggaatagcattaggagaaatacctaatgtagacaacgggttgatgggtgaagcaaaccaccatggaacgtatatacctatgtaacaaacctgcacgttctgtacatgtaccccagaacttaaagtataataataatgaaaaagtttttgcaggaaaggagaccaaccagccttgttgaggagctattgccagaacttactgtaaaatgcaaggacatccaagtggtacaaagggcgaatgaaagtggatgctctggagcaccagcctgatcccctttaagaactgaagcactaatttccccacctgctggaagtgctggtagctgatggccctcagctgaagaatgttgactcacacaagcttgtagcctctgcctgatggaaaccagcagccaacaggtggtcgaattgagggtataaaagccagcacctgccccctaatgcttgcctcaaagaaaggcaaccatggagggttatctcaattgcaggtttccctgagctatggactgaagcatccattgcaactccttcaccattctatttcttcctctgtgtaatcatgtttttttttcaatcctcacaagtgttattactgacagcaatttccaataaagtttctgcctacaaaaaaaatgattcatgttctgtcatccttatggagaccgggcttggggcccatgcaagacagacagttaaacatgagatactagcacaaagctgggaccctttaaaggccgcttcctcagagaataggtagactagacaaaccctacccaccaacagaaggagacaatgggaagcctgccctttgggtaacaaaaaagaatttctactagcaaatccaaacccctaggattctaccacacatgaatttagaatccaaattcatgttacctgcatggcccagggacttatcatctgagaaatcaacataacctttgtctggggtaatacacggcaggtaatgatacatggcagatgcaaatgcataaagctctctggggaatttttctcaaggtattcctacagaagaaaatgagtccaaataacaatgtgttcatatgataaagaataagagaaggagaagaaggaaattgcttgaccagctatccagtcttataaagctatacaagggacagaaaaatactatagaacaaaatggtatcatataaagcgacctgagaagtctggctcttgaccaaaaatccgatgtgtgattttttttttttttttttggcccaactatcggcaattagaggctttacctgacaggccttatgaggaaaaactgccctccctacaccagacttagagcacagccaatgcattgcagtctctgaaggaagctgcagtaaaggacccaactcagcctcccctatacccccttttcaggagcctctgccaaaacctctttattggggggaagggaggatttttttccactctcacttaattttcaatactttgccactcctagcccttttctcttgccctcccctcagttcttggtttcagaaagcaggagccttttgtttatggctcacttaacagtgagaggagccccatgtctgtgccgatccatctgaacctcgactagcactagcacactatcacaaggggaaaaatagaacagggtgctttctcgggtttaacctcttgcttatctagtcttgactgttaacttttgttttggcttaaggttttaatcagctactccaagacttaacaactcagctttctccaactcagctgaggtcctgacaagacctagataagtgtataacacctatcttggtatataactaaagttacattataactcagtgaggaaaggatgaattagtcattaaactatgctgtgacaattggttctccataggagaaatgagacaaagttagatccctacttcaagtgatgggctgggaaacgtttaacaaccagcttcctgggacaggattggaaaccttatttgtagcacttgccaatttctgtggtgtaaagactttcaccatgggtaatcaagctacctatgtgatgtcatggaatgcagagttgggaacagatgcatttaattatctctagcaagctgattctagtacaacactactgccctccacaatacacaaacataagctgcagatagagtgtatatttaaacatgaaaagaaaattttaaaacttatagaaataaacagataagtctatatcataagtggataaggaagaaattcatagtaagacaaaaataagtacaaacttctttcacactattaggacacattgataataataaaaatgtacttatgttttccgacttgaagtgttctatattattttagatcaccaagggaaacatagtatttatataatacgaatgaatgaagacagatttgtttgaatgcacagctttagcttcacacgtataacagataggtatgctgttgtttagaagatgatcttcaaaagtcaaaaagtttacagtgagaaacacctcactgtaaaagccttattcttgctgcattttattcaagctcatttctcactacattcacaagaactggaattcatgcccatcctgcagtcagtaaatgtctctcttaaatttcaatcaatggcagaagggtgtagaataagaaaaaaaaaatcagtttctgtaactaataagatgataatttttagtgtagagttataatattgtaaaaattatttcaataattagtatattttatacattaaaagtattattcattaaattcattttattatcacattaagtgactttaatacctaaatgatgaaatgcattaataatcagttatgaacataatcataataaataacactaacaactaaagtaaccaataaacattataagtcctatgaacaaaatagttgggttccaaacttccccaaaaagttcctccttttgctttacttactataagcaattgtacattatttaagtatatgattattagcacatataaagtatttcatggtaagccatctagtagtgtcaaaagtaagtgaaagaatggagaaaagtgttgagtttgctgtaaaaggaaataaaaaattataaataaggccacattttagatgcactgtcatttttagttctatttgattctatcctcacagttacatagagcagagccataattgagagaaaccactttatccttctcttcattcttgattgaagaagaaaatcattgaaacataaccaatatcctttgcaagttcacgagctaggacatttttctgccttccttttgcagactcatattaaatggatataaagggtcctgggtcagtctagagtttaccaccatggttcacaaacatgtctgtgcataaatatcttaggtacttatttaaaatatagactcctgggcctcacacaagttatactgatgtagtatatagtatctagagattggtatgttcagtacttgccgtcctccaaaattattctgatttagcccatctatagatagactagcatttcaaaattactcctagaatttcctgggaaatatttatgtgttttaggtaggggattaagggctggacatgtttatgtattcatctcaaaaagtgggagcaaaagaatatatggtagatatgtggttttcatgtataaactcaaaagtatctttgttgtaattgggcttatgggccaaagaacaaaattgaagattagtattcttatgggtttacaatattccatataccgttgtccaagtgaatgtcatgggcattccagccattcaaccatctaattatccactaggtattatctattttaccttataaataacctgttatgtctgtccatttttctttttgtttattgatacataatgttgtacctactttgaggatacatgtggtattttgatacatgcatagagtgtgtaatgatcaaaccagggtaatgaggacatccatcacactaaacattcacttctttatgttgggaatattttaattcctctcctctagcaattttgaactgtacaacaaattattgttaactacagtcattctattatattatcaaacactagatcttattccttccgtatatcagtatctctgtacactttaaccaatctctttaattcctttcatccactcaatccttcccagcctctggtgatcaccaatcaaatgtctacctccatgagatccacttttttagctcccacgtatgctttgagaacatgaggtatttgtctttcagagcctggcttatttcacataatacaacgacctaggttggaaagttttctgttattacatctttgaacaagctttctactcttcctcaactccctcttgaacactttttaatttgctcttttgtagttattccctatattgtgttggcattatttgtactttttcattctttttcttttttctcctctgactgtgtattttcaaatacaaagtctgtcttcaggcttactgattctttcttctgcttaattcactctactgttgaaaaccaccaatgtattcttcagttcagtatatgtatttcgcagctccaggatttccatttgatattttaaattattatttcaatctctttgttaaattcttctgataaatttgtgaattattcttctatgttgccttggagttcagagtttccttaggactgctatttcaaattcttgatctaagagttcatatatcaccatctcattaggtcatggtttcctgtttgctgtcatttccttttgatgtgtctattattttgcattaaaggattagttatttatgcgagtcttcattttctggcttgttttgatcttcctaggctgtgtttgtttgagatgttctttgcagttgcctattgaggtcccttaattcttgatcactgcctcctttttgtgctgtctgtgcaattgatcctgattgtcagtgagaaattcagttgcttctcctcaaaatagagaaaatgtctggaaaccagaggattttatagagtgcccattagtacttctatattcagtggctaaaattagttgaaaataactaaaagccaatgccagcaccaccactaagagctgagattcttcagaaacgaagccatgtcttaccataccagcaaataaccatggtcagcagaagatatccttcaaggcaaatgaatatgaaatgaagagtaaagaaagttctaaattccaactatgagttgcagaaatgaggactgcagtagacatattctcatccttgctttctttgtatatatttgtataatgaacaaatatcttttttaaaatgttgcctccctccttcccttattatatgaagacatattagtggtcactaatcttatagtctttaggctacaggatacctaaagtagcatatggctacactagaagaaaaattaatatcctccagagatagacacagtgacagataggactttgggtctccctttatttgcattaaagacagttgcaaaaggttaggtataatacatgtttgctattgttgcggaagtgtgtatatggattctatttgctgacgaagaggacttaatgaatgttttatgatgacttttggcaactgttatattaccttctatgttctcccctccactgtaagagctggaaacattggaactacattttccagattaccaagcctctatctttttacatatgcattttatattttaaaaatgagatgttttcacatataatttggacaaagagtggcaaaatccatcttcttcctctgatagtagtggtagacagaggtctgggcatcccagatatgagagttttttaaagtcatttctgtattctcctgctgtttactcttcttgggattaaagaagagctatgaagtctttcagaagattctttttatttcctaattccgtgtggtagcaactctaattctttgtgacagtgagcttgaaagctggtaacgtgacctgagacactcagtcctccacctttccaacaattttgtatatattaattatgtcaaaattttttgactacataatggcctgataaaaaacttggtcccaggaaaatcttttgtatccactacagttttccaatagttatataatgacaagacatagtctctgagtgtctcctttccttccactagacttgaatcaatactatgattttgtacattgtcttcttgggtcccaagttctttatcttcctctgttaagaaaactcatcaacctttcgggttaattcagggatagtaaacaggtagtattggcatttttaaaaagttaaaaataattcagaaacactgcactgagcataatactatttagttctaattttaaatgttttcaagttatcaggtaggaggtgaaaagttattgtggcatattatttattttgtctaacatcacatttctatttaatcatctaattttgtaattaaggttctctgtgatatagttatgcaattaatgatagttacagtatttaaaatattcgagtaaacctaactgtataactttacgtggaatctttagacctttattatactgatgcttacacttttatttaattgatcgttgccctatccagagtcctcttacttcaggtgtgagtactattgtgccttgtcaacagcatatacataatgcacagctatgaccttttcccttattttctttttcacataatttctatttcaggataaatattaatcatatcaggcaataagtttttaaagatgactatcctactctcaggaggattaaggcactgaatctttggcttttttccattatacaacctatctgggtctcaaagaactaaagtgacggtttatgattgttataccgactgtcccccagttggtcattttccacaaccatcctaatcaaacaaataataggccttatttttaattaaatgtacaaagttaaataaggaattcaaataatagcagctattatttactagcttctatttcaaataaaattctgtgttaagtgttttgtatacctttatgtttttcacaaaaggcctttgaagaagacataattatttataatttatatactaataaattcaggtaaaattatgttaaattactgtttaagtaattgggattagaatccagatccatcttaagtcaaatcactgccctttacaaaatatgatactatactgctttaaaaagtcaatttatagtattataagccatgctgatgaaatgaagacctaatataatcagtttcacaactgatttaaatgagactataaataacaattgtataactttacatgattttaaatactacattattagagtcaatattgtctagttttcagtatctaaatccatgaaaatatatagtgagagtcgcttacttatgtccgcttttcacacgtgaaatgaccacttgcatcagatatgaagtgattcttaataacgtttgaaaacattcttactaacatttgaaaatatttgctcaagacgcatatattcagctgcttatgtgccacttctacgttccttatctgttataaaacttataactatttgttactgttcaatctcacaaaatacagaactcaaaggatggaaagcaaaatccaggaaatggatacagctgtagatgtgctaacatagcaggtagagggctccagaaagagcaaatattttctattggggaggagagattctcactttaagacatggttgctcagagtgaggatcactgaggaaaaaagaaaaataaataaataataaaaataaataaaacatggttgcatgattcagaagcatttctagttttttgttcctctttttcctctaatttatccctccagtcacttgtggtaatagtgatgttgctttaatgatgtgtaaatggccccagagagcttccttatgaaatgacaatgaagtttttcttaaatctagacttcctttggcttcaggttttcccatatccaataatcagaataatcatcatttaccaacttcatgaggtacacaccttctgaatcagtcaggacttttactgttgtaagcaacagaaaacaattcaaattctttaaacaaacaaaaaataaattattggttcatgtaaaggaaagtctaaaggtaggatgagcctcagctgtgatttggtcagtgatgctctcagctctggcccttttggtgcgctgcctttgtcctcaggctggcttactttggtggtgagataactactgcaatttcaggcttcacaatgcatagcatgctttccagaacaacaacaacaaaaatactcttctgtcacagcattttaccctgattgagccaccttaggttacatgccctgaacaaagcattctagacagagggtagaaaaattgtgattgacttaaactgaagatgggatctgctttgctgaaagcagaaaaacttcatgaggaatgagtttgggtccagaaatctgtattctgagtcctgttttactgattcaaactgggtgtctttgtatttcctagtaatgcattcaaccatactcgagctgtctggtatgaaagtcaacctcatataggattctagttttatatatgtttaccttcttgattacattcctatccaggttgatttttcattgaaaatttccctcaaactatagaatgccatcatttgaggcaccaaacatccaatgacttcaatcaaaatcatcatagtcaaaactacaacaagatgacactctttctttttttactttcattcttgcttggcatctaacttctgttgtaatgacctttctcaaaaaccaaacatcctccaacacccaacagaaaaatcagtcatttttttttgtttttaggaataattgttttctggatcctttctgcaataacaatgaagaaaaaaggttttgattgcaaggtaatcacatatgttatggttgctttaaaaaggacatgaaagatagcttttgtgagagtccttcataaagatattgccttttctatttattttaaaataatactggttgtttataattgaattttagcatgatcagaatggtgtaaataaggtaatatgtatctctacccttctttttaactgcaatgttgtaatccatttaaaaattgggctacttcattttacagtatttaaaaagtgattgtagtataggcagaagatcatctaatataaattcaacactccagtttagggatatagaatgactaatttgtgtcatataaggggccttaaagaataactagtcatgatgaaaataaacaagaaggataagtaaataagagcattattatgcagacatttatgaaccattaagcataatcatagctaaggaaatagctttctgtttgctagagataaccactctgaactaggatacataatactttcaatgactaatacaagaatatttatattacaagcagagtgaaatgcaatatctatgtacaatatgatatgagaagcaaataataacaatgtcttttactaatggacttctgattaatcaaaaaagatgattgaataataatctttaaagatatattctaaggatacacatttcaaaagtatattttataaaatgtgttttttcattgaaaaatctcaacgtttacagactgtcaccatttcatgcaccaaatacccaatgacttcaatcagaatcatcatagtcaaaactgtagtaggatgactctcattcttttttttcttgacattaaatttaatgactatcaactcaaaggcaataaataatcatactgtatgtagctacaaaatatagacaatatgtaaagatatactaattttgaaattattttgcatatttattatgtctatataaaatgtgcaaatatgtttaaaatgcaacactaaatataaccatgaatggatttatttttgagaacaacaatgatcttagtagcactatcctttaagagaataacatgctaaaagaactatatccagatttaaaaatataacaatcataataactttacattactttgttttttaaaaagtaatgagctatttctagacagtaaagagtttttcatagtatttattaattaaaatttttcccaccaaaggcatcctgaataattttatttaatgggaatttaaccaagtaaatgatgacaaaatataactcattcagaaatggaattattatttaagttcacaagaagtacataatgatcatttccactcttatctcctagtcatccaaacaaatgagagtccatttaaaggtggtcaccttgttaatctggtgtcagagaaaattttttcctgaaaaaaattctgctttgggcagaatgctgtacattgacacaaataaaacattttaattgatgaaactgactatgttttaacactacagttttacttggtaaatatgtaacctctcaagagaaatagtctgaggtttttaaggatacttttagtttactgcatctttcaaaatatttgtactaaaacctaaacattaacctgacacgtcagaatacttacaagaacttgtgatatgagacaatgacggaaaatagatgtcttaaataaagaggaacttttaaacttaatcattagttcaacggtatttctggagtacttgatagatgccaagctgtattaatgatacagaactatcatcatcgtcatcatgatcatcatcatagctaacatttatcgtgtctttatatatacaagtactctgctgtaggttttgttgttgttattatgtctggttttttcttatttcatttaatcttttattttctcccctatctgtataaaagataatacttagattattaataggttttactattattatagaaaattcagaaataacttgttcacagctatatagtaattgctgaagcctttatttaaatccaggaaatgttattccaaagcatgatatttgaactactaaactacagttgcttattaccaagaatcctacaatctatatgggagacagtacatacacacacccgcttgcttgaatttaaggttttttttttctatcctataatactcctactcaagcagttgctgatacctagaatatatatctcaaagctgtctacttctctgtgtctccaccaccatcatcctgaccaaacgatctctatctgatctactgacatagacttataactagtgtccttgtttctacctgtgtctttttagcccaaaagtcagcatcttatttaatgagaaaacactagagtcattccaactaaaatacaaaataatgcaaagatgttgatatggtttggctgtgtccccatccaaatctcatcttgaattgtagttcccatgatccccatgtgtcatgggagggccctggtagcaagtaattgaatcatggagatgccaacccgcatgctgcacttctcatgatagtgagtgagctctcagaagatctgatggttttatgagggacttttccccctttttgctctgtacttctctctcctgctgccatatgaaggacatgttttcttccccttctgccaagattgtaagtttcctgaggcctccccagccatgcagaactgtgagccaattaaaactcttttctatataaattacccagtctcgggtatgtatttattagtagggtgagaagagactaatacaaatgctcactatctcctctattcttcagtattggacagagatatcactcaatgcaattagaaaagataaattaattaaaggtagtgagaactacaagaataaaaactatgatatgatagtatatctgaaaaaaaattagagattcaaaactaaaagtaacaaaataattcagtaaggtagcaagatgtaaaatcattatacagaagtcaataggctttacaaataaaaacaataatagctagaaaatgtaatggtataaaaatccccatttacaggaaaaacaaaaatatgaaacacctaagaataggattaatagaaaatgtggaaagcctatatgaggaaatttttaaaatactcttgaaagatataatgaaatacctcaaacaaagagataaagattcctttttcttggataggttgactctatatgataaaacgtcagttctctctataagttcctttatatatttagaacaatcccaatacaaatatcagcaatttttttcgtggatccaaacatgttgatactaaagtttatatggaaaaacaaaatcaaaatatcaacagtaaacactgaaaatagaaacttacaaggtaagatcagcctaccatacattaagtcatatcatagatttctattattaaacccgtacagtattcatgcatgaatagaccaacaatccagtgcaatagaatagggtgtccagaaatagaccaaagtacacatggaaatttagtatataataatgtaggcatctcaaatcactgggataaagatagacttttttttaatggtgtgggaacaaccagtcagccattttagaagaagacaaaaagtctatttccgaataacaaattccgaatggatcaggggtttaaatataaaaaataaaactatacaggtactagaataaaatctgaatatagggaaaaaatgtccacctatgactcaaatccagactgaataaaagaaaagatcaataaatttgttaatacaaaaattttaaagccatcaaaaagctccaggcccagaatcaaaggataactcacaaactaggagaaaattttcaacatatatcacaattaaagggctaatagctctacctttataacaactcctaaaagttgaagaaaaaatccaaaaatccaattgaaaatgggcaaaagtcatgaatagacaagtcactatatctatatctataactatctctctctctctctctctatatatatatatacatatatacatacatcccttaaacatatgaacagaagttcaaccttattcatcattacagaaatgcaaattataagtacattgttatattatacttcacctacgtgactggcaaaaattataaattacaacaatacattttaccggtgaactgtaggaaaaccatcattctcatatattgtgggtgggaatgcaaactcatccaacatctatggaagggaactcagtaatgtctaatgagcgctacatatgcatttatcttctgatccagcaacccaacatctagaactttaccctgaagatataattccggaaacaggaaaatgcatatgcataaggttcttccttgcagtgttgtatgcaactgtaaaatattggaaacaatctaaatggctatacctagaaaactatggcagagccacataatagaatattatgtaaagtgcaaaggtatgctagtttttgcttaaggaaaagggggaaataaaacaatgtatatctactcagttacaccaaaggaaacataagaaggacaaatcggaaacaaatgagatttgttacctctagatagtgcatgagaatgaagtggaaagggtgggagagtgagaatgggatagaagataacacttctctcccatgtagttttgcttacagctctgaaatcatatcaacatttcacatatttagaaagtaaaaccaatcaggatggggaaaataaaaacaaaaggaaatataaacaaacagaataaaagagaacttactggtatttcaaataaataacatcctcagactgaaggggagcaaaaaaaaaaataacccaattaacctattaacatagtattttggctatacacctctgggctgtagacacacacacacacacacacacacacacacacacacacacacacacacactggacactaagttaaaagggttgttgtttttcccagtgctatgggttaacaattctcaaactgtgtgtgtgtgtgtgtgtgtgtgtgtgtgtatcttgtgtgtgtatcttgtaggattgagcaacaagtggaatgtattgcagagaaatggagatagatttgttacttttggagaagtgagttacaaatctggaaagagtggaggttagaatgagttttgtggttttatatcagaattggagacaacagtatgaactcatggtttttcagatagataggtaggcacatatgcatatatgtgtgtgcgcgcacacacacacacacacacacacactttctaggtctatcaggaggacctaaagcaatggcaccccagaagcaatgagtacctagtgtccaaatgttggtctctaaatattagtttccaagacttcttaatgcaggacgatttgagcattaaataaataatgacaacaaggattaataacccatagattaaaataagaatacttatatacaaaaatgaataaatggatgagtagggaaagctgttattgaaatagtaaatgacaattagtaagtgcaaaaggaattatagatttataaaattactaatagcatttgtctccacctttggaagtaataattcagacaagaatcatcaatggattataaatctagtgggtgcatgtttaatgaaaaccagcatattaaatcatcttaaagtatctctccaaaatattgattacaaaaactatagcaacttcagaattgggaaacttgcctgataccgtcatatccaagttaccaaggttaacatcatttctaatggtgccatctgataggatgcattgaaacacataataacacttctctggtatccccgccaaagatgcataaaccgaatataatcatgaggaaacaacaaacacacccaaactgagagacaaaatgactggctaacattctttttttttttttttttttgaggtatgttttattttattttatttttttttgcattgtgggtttatttatttatttatttacttatttatttatttattttattgatcattcttgggtgtttctcacagagggggatttggcagggtcataggacaatagtagagggaaggtcagcagataaacaagtgaacaaaggtctctggttttcctaggcggaggaccctgcggccttccgcagtgtttgtgtccctgggtacttgagattagggagtggtgatgattcttaacgagcatgctgccttcaagcttctgtttaacaaagcacctcttacaccgcccttaatccatttaaccctgagtggacacagcacatgtttcagagagcacagggttgggggtaaggtcacagatcaacaggatcccaaggccgaagaatttttcttagtacagaacaaaatgaaaagtttcccatgtctacttctttctagacagacacggcaaccatccgatttctcaatcttttccccacattcccccctttctattccacaaaaccgccattgtcatcatggcccgttctcaatgagctgttgggtacacctcccagacggggtggcggccgggcagaggggctcctcacttcctagtaggggcggccgggcagaggcgcccctcacctcccggacggggcggctggccgggcggggggctgacccccccacctccctcccagacggggtggctggccgggcgtggggctgaccccccaacctctctcccggatggggcggctggccgggcagaggggctcctcacttcccagtaggggcggctgggcagagatgcccctcacctcccggacgggacggctggctgggcagggggctgacccccccacctccctcccggacggggtggctggccgggcggggggctgacccccccacctccctcccggactgggtggctgccgggcggagacgctcctcacttcccagacggggtggttgctgggcggaggggctcctcacttctcagacggggtggctgccaggcagaggggctcctcacttctcagatggggaggttgccaggcagagggtctcctcacttctcagacggggtggccaaaaatatcaagatgatggaaaacctgggacaaaatgtcttcaccatgactgaagaacactttttgagtaaagagaactagagagacaattaaatgcaatgtgtgatgctggattggtgtttttttttttctgctgctgtaaatatcattggcgaaattttaataaggtgtaaagattagacaccagcattgtatcagcatttatttcctgattttggcaattctactgtggttatttaagtgaatgtctttctttttaagaaataaacactgtagtatttaggagtcagaggggatcctgtccatttatcatcaaacaaattttaaaaagacagtacgtatctacagagagaatgatcaagtaaaatttggtattatgttaacattcaaaaaatttgggtgaatgactattcagacatctttggtactattctcacaacttttctgtgaatataaaatatttaaaagttgaaagttaaaaagaaaaatatattgtatttaaaatggagtaatagataaaaatggcaaaatgttgatatttgatgacagctgatagcttcatgtgtatcattagattgttcccttttgtgtatatttgaagttttcaataataaaatattataaaagcctataattaattggattcagaagtctcaactaactaaagtatggaaaaacatgtagaacttttttttccagaaacggatacctacttttctctgcagcatctactgccttttgggtactgggggataatttattctaatttcataacttctcagacatttttattattaaacgactctaatttcaggttaatgtttaataactttaggtattatcatctatcatcattacttcaacttcctcttccttcctcaggtctctctacaactgcattagtcatccgatcagggatgttgaaagcatgtaacctgtttttcctcatctctctcttcctcctcattcctcccctattctttgtccaccttgcaagcaatggctgtggagaaggtatataattgcttaggagattatctgtatccagtgatcacataagctatttcaaaatacaattaagacttgtgggaatttgttgtcaatttttaattttttgggtacatagtaggtgtatgtatttacggagtgcatgagaaattttgatatgggcctgcaatttgaaacaatcatgtcatggagaatggggtatctgtctcctcaagcacttatcacacattgagttacaaacaatccaattaaattcttttagttatttttaaatgtataattaagttgtttttgactatagtcaccctgttgtgctatcaaatagtaggtgttactcaattcttctggcttttatttgtacccattaaccatctccacctgtcccccagtcctctaataagcttcccagcctctggtaatcatctttctactctatctccatgagttcaattgttttgatttttagatcccacagataagtgagaacaaggaatgtttgtcttgctgtggctggcttatttcacttaacataatgacctccatttccatccatgttattgcaagggaatgggtctcattctccattgtgtatatgtaccacattttccttatccataaaaaacagaaatacagatatctctttgatatactgatttcctttctttggggtatatacctagtggtaggattactggatcatatggtagctcaattttttgcttttttgagaacccccaaactgttctccatagtgattgtactaatttacactcccacctacagtgtatgagcattcctctttctccacatcctcaccagcatttgttattgcctgtcttttggatataagtaattttaattggggtgagatgatatctcattgtcgttttgatttgcatttctctgatgataaatgatgttgagcacattttcatatgcttgtcacttgtatgtcttcttttgagaaatatctattcaaatcttttgcccatttttcgataagattagattttttgcaatagaattgtttgagctccttatatattctggtaataaatcccttgtcagatgggtagggtgcaaacattttctcccattctgaggggttgccttttcacttggttgatgtttcctttgctgtgcagaagcattttaacttgctgtcatcccattagtgcatttttgctttggtttcctgtgtcggtagggtactgctcaagaaatctttacccagaccaatgtcctggaaaatttccccaaagttttattgtagcagtttcatagtttgaggtctgagatttaagtctttaaccagtttgatttaatttttgtatatgccaagagataggggtctagtttcattcttctgcatatggatatccagttttccctgcaccatttattgaagagattgtcttttccccagtgtatgttctcggcacttttgtcaaaagtgagtttactatgagtgtgtgaatttgtttttgggttctctattctgttccattggtgtatgtgtctgcttttacaccagtaccatgctattttgcttactatggctctgcactataatttgaagtcaggtgatgtgattcctccagttttgcccttttggcttaggatagctttgtctcttctaggcattctgtggctccgtataaattttaggactgttttttctatttctgtgaagaacggcattggtatcttgatagggattgtattgaatctgcagattgctttggatagtatggacattttgacaatatttattcttccaatccatgaacatgaaatgtttttccattatttggtgtcctcttcaatttctttcaacagtgttttatagttttcattatagagatttttcacttctttggttaagttaatttctaggtatttaattttatgtgtggctattgtaaatcataatttttatttctttttcacattgcacaccattggcatatacaaatgctactgattttgcgtgtttgttttgtatcctacaactttaatgaattttttagttctaacagtttttttgtagagtctttaggttttttttcaaacataagattatatatatcatctgaaaacaaagataatttgacttcttccattccaatctgaacacagtttatttctttctcttgtctgattgttttagctgggacttgcagtactatgttgaataacagtgatgacagcgggcatccttgtcatgttccagatcttagagggaaggatttccagggatatttcttccatttagtataatattagctgtaggtctctcatctacagcttttattattttcaagtatggtcgttctatacccagttttttaagggtttttatcagaatgggatactgaattttatttatttatttttctttttattattattattatactttaaattttagggtacatgtgcacaatgtgcaggttagttacatatgtatacatgtgccatgctggtgtgctgcacccattaactcgtcatttagcattaggtatatctcctaatgctatccctccccccctccccccgcccccaccccacaacagtccccagagtgtgatgttcctcttcctgtgtccatgtgttctcattgttcaattcccatctatgagtgagaatgtgtggtgtttggtattttgtccttgagatagtttactgagaatgatgatttccaatttcatccatgtccctacaaaggacatgaactcatcattttttatggctgcatagtattccatggtgtatatgtgccacattttcttaatccagtctgtcattgttggacatttgggttggttccaagtctttgctattgtgaatagtgccacaataaacatacgtgtgcatgtgtctttatagcagcatgatttatagtcctttgggtatatacccagtaatgggatggctgggtcaaatggtatttctagttctagatccctgaggaatcgccacactgacttccacaagggttgaactagtttaccgtcccaccaacagtgtaaaagtgttcctatttctccacatcctctccagcacctgttgtttcctgactttttaatgattgcaattctaactggtgtgagatggtatctcattgtggttttgatttgcatttctctgatggccagtgatgatgagcattttttcatgtgtcttttgcctgcataaatgtcttcttttcagaagtgtctgttcatgtcatttgcccactttttgatcgggttgtttgtttttttttgtaaatttgtttgagttcattgtagattctggatattagccctttgtcagatgagtaggttgcaaaaattttctcccattttgtaggttgcctgttcattctgatggtagtttcttttgctgtgcagaagctctttagtttaattagatcccatttgtcaattttggcttttgttgcccttgcttttggtgttttagacatgaagtccttgcccatgcctatgtcctgaatgatattgcctaggttttcttctagggtttttatggttttaggtcgaacgtttaagtctttaatccatcttgaattaatttttgtataaggtgtaaggaagggatccagtttcagctttctacctatggctagccagttttcccagcaccatttattaaatagggaatcctttccccatttcttgtttttctcaggtttgtcaaagatcagatggttgtagatattcggtgttatttctgagggctctgttctgttccattgatctatatctctgttttggtaccagtaccatgctgttttggttactgtagccttgtagtatagtttgaagtcaggtagcgtgatgcctccggctttgttcttttggcttagtattgacttggtgatgcaggctcttttttggttccatatgaactttaaagtagttttttccaattctgtgaagaaagccattggtagcttgatggggatggcattgaatctataaattaccttgggcagtatggccattttcacgatattgattcttcctacccatgagcatggaaggttcttccatttgtttgtattctcttttatttcattgagcagtggtttgtagttctccttgaagaggtccttcacgtcccttgtaagttggattcctaggtattttactctctttgaagcaattgtgaatgggagttcactcatgatttggctctctgtttgtctgttattggtgtataagaatgcttctgatttttatacattgattttgtatcctgagactttgctgaagttgcctgtcagcttaaggagattttgtgctgagacaatggggttttctagatatacaatcatgtcgtctacaaacagggacaatttgacttcctcttttcctaattgaataccctttatttccttctgcctaattgccctgggcagaacttccaagactatgttgaataggagtggtgagagagggcatccctgtcttgtgccagttttcaaagggaatgcttccagtttttgcccattcagtatgatattggctgtgggtttgtcatagatagctcttattattttgagatacagcccatcaatacctaatttattgagagttttcagcatgaagggttgttgaattttgtcaaaggccttttctgcatctattgagataatcatgtggttttttgtctttggttctgtttatatgctggattacatttattgatttgcatatattgaaccagccttgcatcccaaggatgaagcccacttgatcatggtggataagctttttgatgtgctgctggattcggtttgccagtattttattgaggatttttgcatcaatgttcatcaaggatattggtctaaaattctcttttttggttgtgtctctgccaggctttggtatcacgatgatgctggcctcataaaatgagttagggaggattccctctttttctattgattggaatagtttcagaaggaatggtaccagcttctccttgtacctctggtagaattctgctgtgaatccatctggtcctggactctttttggttggtaagctattgattattgccacaatttcagagcctgttattggtctattcagagattcaacttcttcctggtttagtcttgggagagtgtatgtgttgaggaatttatccatttcttctagattttctagtttatttgcatagaggtgtttgtagtattctctgatggtagtttgtatttctgtggaatcggtggtgatatcccctttatcattttttattgcatctatttgattcttctctctttttttctttattagtcttactagtggtctatcaattttgttgatcctttcaaaaaaccagctcctggattcattaattttttgaagggtttttttgtctctatttccttcagttctgctctgattttagttatttcttttttttttttttttctttattttttttttcttttttttttttttattatactctcagttttagggtacatgtgcacattgtgcaggttagttacatatgtatacatgtgccatgctggtgcgctgcacccactaatgtgtcatctagcattaggtatatctcccaatgctatccctcccccctcccccgaccccaccacagtccccagagtgtgatattccccttcctgtgtccatgtgatctcattgttcaattcccacctatgagtgagaatatgcggtgtttggttttttgttcttgcgatagtttactgagaatgatggtttccaatttcatccatgtccctacaaaggatatgaactcatcattttttatggctgcatagtattccatggtgtatatgtgccacattttcttaatccagactatcattgttggacatttgggttggttccaagtctttgctattgtgaatagtgccgcaataagcatacgtgtgcatgtgtctttatagcagcatgatttatagtcctttgggtatatacccagtaatgggatggctgggtcaaatggtatttctagttctagatccctgaggaatcgccacactgacttccacaatggttgaactagtttacagtcccaccaacagtgtaaaagtgttcctatttctccacatcctctccagcacctgttgtttcctgactttttaatgattgccattctaactggtgtgagatgatatctcatagtggttttgatttgcatttctctgatggccagtgatgatgagcattttttcatgtgttttttggctgcataaatgtcttcttttgagaagtgtctgttcatgtccttcgcccactttttgatggggttgtttgtttttttcttgtaaatttgtttgagttcattgtagattctggatattagccctttgtcagatgagtaggttgcaaaaattttctcccatgttgtaggttgcctgttcactctgatggtagtttcttttgctgtgcagaagctctttagtttaattagatcccatttgtcaattttggtttttgttgccattgcttttggtgttttggacatgaagtccttgcccacgcctatgtcctgaatggtaatgcctaggttttcttctagggtttttatggttttaggtctaacatttaagtctttaatccatcttgaattgatttttgtataaggtgtaaggaagggatccagtttcagctttctacatatggctagccagttttcccagcaccatttattaaatagggaatcctttccccattgcttgtttttctcaggtttgtcaaagatcagatagttgtagatatgcggcattatttctgagggctctgttctgttccattgatctatatctctgttttggtaccagtaccatgctgttttggttactgtagccttgtagtatagtttgaagtcaggtagtgtgatgcctccagctttgttcttttggcttaggattgacttggcaatgcgggctcttttttggttccatatgaactttaaagtagttttttccaattctgtgaagaaagtcattggtagcttgatggggatggcattgaatctgtaaattaccttgggcagtatggccattttcacgatattgattcttcctacccatgagcatggaatgttcttccatttgtttgtgtcctcttttatttccttgagcagtggtttgtagttctccttgaagaggtccttcacatcccttgtaagttggattcctaagtattttattctctttgaagcaattgtgaatgggagttcacccatgatttggctctctgtttgtctgttgttggtgtataagaatgcttgtgatttttgtacattgattttgtatcctgagactttgctgaagttgcttatcagcttaaggagattttgggctgagatgatggggttttctagataaacaatcatgtcgtctgcaaacagggacaatttgacttcctcttttcctaattgaataccctttatttccttctcctgcctgattgccctggccagaacttccaacactatgttgaataggagcggtgagagagggcatccctgtcttgtgccagttttcaaagggaatgcttccagtttttgcccattcagtatgatattggctgtgggtttgtcatagatagctcttattattttgagatacgtcccatcaatacctaatttattgagagtttttagcatgaagggttgttgaattttgtcaaaggctttttctgcatctattgagataatcatgtggtttttgtctttggctctgtttatatgctggattacatttattgatttgcgtatattgaaccagccttgcatcccagggatgaagcccacttgatcatggtggataagctttttgatgtgctgctggattcggtttgccagtattttattgaggatttttgcatcaatgttcatcaaggatattggtctaaaattctcttttttggttgtgtctctgcccggctttggtatcagaatgatgctggcctcataaaatgagttagggaggattccctctttttctattgattggaatagtttcagaaggaatggtaccagttcctccttgtacctctggtagaattcggctgtgaatccatctggtcctggactctttttggttggtaaactattgattattgccacaatttcagagcctgttattggactattcagagattcaacttcttcctggtttagtcttgggagagtgtatgtgtcgaggaatgtacccatttcttctagattttctagtttatttgcgtagaggtgtttgtagtattctctgatggtagtttgtatttctgtgggatcggtggtgatatcccctttatcattttttattgtgtctatttgattcttctctctttttttctttattagtcttgctagcggtctatcaattttgttgatcctttcaaaaaaccagctcctggattcattgattttttgaagggttttttgtgtctctatttccttcagttctgctctgattttagttatttcttgccttctgctagcttttgaatgtgtttgctcttgcttttctagttcttttaattgtgatgttagggtgtcaattttggatctttcctgctttctgttgtggtcatttagtgctataaatttccctctacacactgctttgaatgtgtcccagagattctggtatgttgtgtctttgttctcgttggtttcaaagaacatctttatttctgccttcatttcgttatgtacccagtagtcattcaggagcaggttgttcagtttccatgtagttgagcggctttgagtgagattcttaatcctgagttctagtttgattgcactgtggtctgagagatagtttgttataatttctgttcttttacatttgctgaggagagctttacttccaactatgtggtcaattttggaataggtgtggtgtggtgctgaaaaaaatgtatattctgttgatttggggtggagagttctgtagatgtctattaggtctgcttggtgcagagctgagttcaattcctgggtatccttgttgactttctgtctcgttgatctgtctaatgttgacagtggggtgttaaagtctctcattattaatgtgtgggagtctaagtctctttgtaggtcactgaggacttgctttatgaatctgggtgctcctgtattgggtgcataaatatttaggatagttagctcctcttgttgaattgatccctttaccattatgtaatggccttctttgtctcttttgatcttcgttggtttgaagtctgttttatcagagactaggattgcaacccctgccttttgttgttttccatttgcttggtagatcttcctccatccttttattttgagcctatgtgtgtctctgcacgtgagatgggtttcctgaatacagcacactgatgggtcttgactctttatccaacttgccagtctgtgtcttttaattgcagaatttagtccatttatatttaaagttaatattgttatgtgtgaatttgatcctgtcattatgatgttagctggtgattttgctcattagttgatgcagtttcttcctagtctcgatggtctttacattttggcatgattttgcagcggctggtaccggttgttcctttccatgtttagtgattccttcaggagctcttttagggcaggcctggtggtgacaaaatctctcagcatttgcttgtctataaagtattttttttctccttcacttatgaagcttagtttggctggatatgaaattctgggttgaaaattcttttctttaagaatgttgaatattggcccccactctcttctggcttgtagggtttctgccgagagatccgctgttagtctgatgggctttcctttgagggtaacccgacctttctctctggctgcccttaacattttttccttcatttcaactttggtgaatctgacaattatgtgtcttggagttgctcttctcgaggagtatctttgtggcgttctctgtatttcctgaatctgaacgttggcctgccttgctagattggggaagttctcctggataatatcctgcagagtgttttccaacttggttccattctccacatcactttcaggtacaccaatcagacgtagatttggtcttttcacatagtcccatatttcttggaggctttgctcatttctttttattcttttttctctaaacttcccttctcgcttcatttcattcatttcatcttccattgctgataccctttcttccagttgatcgcatcggctcctgaggcttctgcattcttcacgtagttctcgagccttggttttcagctccatcagctcctttaagcacttctctgtattggttattctagttatacattcttctaaatttttttcaaagttttcaacttctttgcctttggtttgaatgtcctcccgtagctcagagtaatttgatcgtctgaagccttcttctctcagctcgtcaaaatcattctccatccagctttgttctgttgctagtgaggaactgcgttcctttggaggaggagaggcgctctgcattttagagtttccagtttttctgttctgttttttccccatctttgtggttttatctacttttggtctttgatgatggtgatgtacagatgggttttcggtgtagatgtcctttctggttgttagttttccttctaacagacaggaccctcagctgcaggtctgttggaataccctgccgtgtgaggtgtcagtgtgcccctgctggggggtgcctcccagttaggctgctcgggggtcaggggtcagggacccacttgaggaggcagtctgcccgttctcagatctccagctgcgtgctgggagaaccactgctctcttcaaagctgtcagacagggacacttaagtctgcagaggttactgctgtctttttgtttgtctgtgccctgcccccagaggtggagcctacagaggcaggcaggcctccttgagctgtggtgggctccacccagttcgagcttcccggctgctttgtttacctaagcaagcctgggcaatggcgggcgcccctcccccagcctcgttgccgccttgcagtttgatctcagactgctgtgctagcaatcagcgagattccgtgggcgtaggaccctccgagccaggtgtgggatatagtctcgtggtgcgccgtttcttaagccggtctgaaaagcgcaatattcgggtgggagtgacccgattttccaggtacgtccgtcacccctttctttgactcggaaagggaactccctgaccccttgcgcttcccaggtgaggcaatgcctcgccctgcttcggcttgcgcacggtgcgcacacacactggcctgcgcccactgtctggcactccctattgagatgaacccggtacctcagatggaaatgcagaaatcacctgtcttctgcgtcgctcacgctgggagctgtagaccggagctgttcctattcggccatcttggctcctcctctccctgattttagttatttcttgccttctgctagcttttgaatgtttgctcttgcttttctagttcttttaattgtgatgttagggtgtcaattttggatctttcctgctttctgttgtggtcatttagtgctataaatttccctctacacactgctttgaatgtgtcccagagattctggtatgttgtgtctttgttctcgttggtttcaaagaacatctttatttctgccttcatttccttatgtacccagtagtcattcaggagcaggttgttcagtttccatgtagtttagcggtttttagtgagtcttaatcctgagttctagtttgattgcactgtggtctgagagacagtttgttataatttgtggtcttttacatttgctgaggagagctttacttccaagtatgtggtcaattttggaataggtgtggtgtggtgctgaaaaaaatgtatattctattgatttggggtggagagttctgtagatgtctattaggtctgcttggtgcagagctgagttcaattcctgggtatccttgttaactttctgtctcattggtctgtctaatgttgacagtggggtgttaaagtttcccattattattgtgtgggagtctaagtctctttgtaggtcactcaggacttgctttatgaatctgggtgctcctgtattgggtgcatatatatttaggatagttagctctttttgttgaattgatccctttaccattatgtaatggcctcctttgtctcttttgatctttgttggtttaaagtctgttttatcagagactaggattgcaagaattttattaaatgatttccagcatcaattaaaataatcacgttttttattcttcattcaattgatatgatacaccacattgattgatatgagtattttgaaccacgcttgcattacagtgataaatctcacttgttcataatgaatgacctttctaatgtattgttgaatttggtttgttagtatttggttgaagatatttgcctcaatattcatcagaattattggcctttttctttttcttatgtgtctttctgtgtttttggtatcagggtaatattggccttgtagaatgagtttgaaattattccttccccctgtattttttgaaatagtttgagtagcattgatattagttcttcttcatatgttgggtagaattcagcagtgaagccagtgggtcccaggcttttctttactgggagacattttgctacggctttgatctcatttgttggtattggtttgttcaggttttggacttcttcctggttcaatctgtgtaggttgtatgtgtctgggaatttgtccatttcttccaaattatctaatttattggcctatagttgctcatagtagccagtaaagatcttttgaatttctacagtatcagttgtaatgtcttctttttcatttctgagtttatttatttttatcttctcactttctttcttagttagtgtagctaaaggtttttcaattttgtttaacatttcaacaaaacaactttttgtttcattgatctttgtaatatttccattttatttatttcttctctgatctttatcatttattttcttctactaattctggatttggtttgctcttgcttttctagttctttaagatgcatcattagagtgtatatttgaagtttttcctcttttttaatataggcacttacagctgtaaacttccatatcagtactgcttttgcagtatcccataggttttcgtatgttgtgtttccattattatttgtttcaaaaatgtttttcaatttctttcttaatttcttccctaacccactggctaatcagttcattcacgtcattcagacatattgtttaatttccatgtgtttgtgtagatttcaaaattcttcctgttattaatttctagttttattccattgtgctcagaaaagatacttgatattctttcaattttttgaacattttaaaactagctttgtgacctaacatatggtttgaccttgagaatgatccatgtgctgaggaaaagaatgtgtattctgcagctctttgatgaaatgctctgtaaatatctattagatccatttggtctacagtgcagattaagtccaatgtttctttgttgattttctgtgtggaaggtctttcccatgctgaaagtggagtgttgaagcctccaggtctgattgtattggtgcctatctctctaactctaataatatttgctttatatatctgggttctcccatgttgggcgcatatatatttaaattgttgcatcctcttgcagaattgactcctttatcattatatagtgaccttgtttgtctcttcttatagtttttgtcttgaaatctattttgcctaggtattgctactaagacttgttaaaattaaaaacacagaagacaatgtaaatggtataacccttaacaatgtaaaaataatcatttaaataacaaattaggtaagaggaggcaagcttacaggtagacaagagaagtggcctaagattaaacctcattgagttttttaaaacgaaataaagaaaaacttcaaaatctcaggttcccccaaacttcttatgcaaaagggaggatgattgcaacactctcttccaaatgtatggctgttactaacattatgcatcagtcagattgccatggaaaggtaaaagacctcaggcatctgggatcaggcttccttgatcattcataagtaagttattggctggcctctcagaaacaaagacatgctaattttaagtttagatctaagtgtagctcttaaaactaaagtctgttccattccacactgacaatgtcattacggttttgtcttcccaggtaatagaacaaagtcaggactcattcctctgcctaccagagacgtctgcataattgactttctttactccccttttcttatcagacattcactttaacttacggaaaatgtagatttagtgggcactaactaaagtctcacaagaatgtaagtatttacctaactggctacctgtccctctttctacatgccgcccctcgtccccttaatgaaatgtataaatactaaacctcctgaaaaacctcttcgggaaaacagccacagatacatctgtggctcatgtttttcccagttgtgccctaaaagtcgcttaataaaccttgatgattaagaattaagcttcagtcactcattttgtttgtcaaagacaaaacccaatgaaatcgtctttgcaaaaattcaaatagtgagaaaattatgacagtgaaagagaactgacctaaccaactccatcttgcctttaaccctaaactgcccttgttcattgctgttcttggactgaggtaactatagaaagaatttagttttcactttaactttgaaacaaagatgacaacagcccttttctgaaataaactgccttcttgcctggggacaaaacgacctttgtaagacttacaaattagccacaagattagaaattatggtttaggagttatacaaccagaggccatgagattctgaaccaccccagttgctcctagtgataacatcactatggtaaaacctaagattggtgttcgagatattttccagaccctgcattctgatgcatcacctggtgccacccagaccggtaatgtggttaagctagttatgcgattctaccaaggaacagaagccagcaagatgaaccagctctgacctcctatgatgtcacctctgacctgaccaatcaggtcactgaggtcctcactgcctaaccccttctcagtctttaaaaaactcagtctctgaattttcggacagactgatttgagcagtagaactcctcttatttagacacctctgcatgcattaaactctttctctattccaattcccctgtcttgataaattggctctgtttgggctgcgggcaagatgaatctgtcaggtagttacaccaatttaaaggctttcaaaatcatttctcttaaatttaaagtatgttttaaatactaatctcatttgcaataaagaaaaatttatcttaagtaaatcaatttcttcagctgcattaatgttcctctttgtcaaaatcaagcaaaagaagcttaaaatttttaaaattaaaattatatatagagtttatttgcatactatagcttataaactacttatggtttgtttatgtatatataaatattataaatatatatataaatacatttttggaaaaacatatatttccatttatctatccatcaatccattcacccattcttttatccatttatatctagatttacttttatttgcttttctatctgtatatttacatagatgagatgtatgactgaaatatttctcaccaactattaatgatagttatttctagatgatattctgtgcaaaatgtttacattttcctcttcatactcttctgtattgattgaatgtttaaattctacccatatatcattttcaaaaaatgaagtcattattcctttaaaaaaaaacagtgtactgtacaatgtcataatacttttcaggtaccatgaacctcactttaaatcataatcccaattctgtggcagcttccactcaaagtcatagaataaaggtatcagctctttagaacaaagcaatatgccattataatatccttaatttaaggaacctaaaatattgagtgtagtatagttaactgtataactccaatgcagttaaattagaatttctgattaaattctaaatggttgtgccaaattcttagctgagagaactgaaatatatctctatcatagacaattcctttccaggaaagttaaatgaaaaggggagatagaggagtctttgaattaaaaagctccagtaaagaatactttgctgtgaatgcaataatataacaagctagaactagaatcactaatgagaaagtgtataccaaaatactgtaaacaagcagtaccactagctgagaggaaataatctcaaacacagctgagtagaaagcaaaattcaagtatctggggatatctgtaaaacaaagtgtatatatgtgcatatatgatactaaaaagcactacatcaagtatatgttaattcatttattcagaattcaaaatgtgtactaccattctagggtaaaaatgttgattaacagtgatgacatgaaatctatcacttgaaataataaacaaaatttattatctccaaattatgttactcatagatgttagacaatcttaagcattttgcttaagatcatagtggcatggaatagagctaatgaaatgtggtaatgccaccataggccatcaggtaataatgtcattaaaattacactaaaaaggaaacaaagaaaaacgtgttttcttcatgtgaccagattttaattttgagaaataaactctgaaagcattttaagccataaattagtctcaaatgaataggaaaaataacaatttttgcttatatcatgcagagaaaggcattcatttattatccagaagaaaatttcatgtggtgcatttatagttaaacatcttgaagcaaatcatcacttaaattcacagtgtctccattggcctttcatcaaaagagaaatatacttcaaaagtttacttcaatttgctcgttaactatgatttcgccttttctaccctatagcatttgataactagatttaaaagaatatcacacaaaccttcttaaaatattgataaacatgtttagataagatgtttttcttatcaaccgaccatatcagaaaagaagagataaactgttagactttctttcttgcccctaattatgtgtcagaaaggaaaataaggccgggtgcagtggctcacacatgtactcccagcactttgtgaggccgaggcgggcagattacctcaggtcgggagttcaagaccagcctgaccaacatggagaagccccatctctactgaaaatacaaaattagccaggtgtggtggtgcacgcctgtaatcccagctactcgggaggctgaggcaagagaatcgcttgaacctgggaagtggatgttgcggtgagccaagactgtgccattgcactccagcctgggcaacaagagtgagactctgtctcaaaaaaaaaaaaaaaaaaaaaaaaggagaaaaggaaaatgaatcacacctttctccttctgcaagtcacaagattcttttccattaaatgtggtggtgcaaaaaaaagtaaagcttgatgaaagaaagacaatgtttccatggcacccttagtacagcaaatttcaaaataaacccatttccaattggctgctttacaacttagtttaactttttttggtaagaatcactttgacataggttaacaacataaacaggttgacttcttttcccagagtaacataaacatgttgtttccaactagtttaccagttttgcctccatgcccaaaagttcaggcaagccccagataattttgtcttagccagtaaacaggatatatgtggaaatgagaaaaatgagtttaattaggaaacaatactttgttacagctgagatgattttaaatgaagcaaatggttgtaaaccatgaatgacagagcatctattttgggacattatggcttattaacagaatgctatttactttcaacttcacaaataaacacagctgtattgttctgaaacatgatgaaaggcatgcacctctactagcagatttagcacttctgaccatcaaaaacaccaacttccttaaaaatgtgcttcatgcactgtattagatttcattaagatatacattttaatgccttatttcttttttgaacttgaatgggaaccagaatggaatgatccagaagatgacctgtggtgcttgggtaaagtaatgtgttctgtaagggttggccctgggctcagggttgtttagtgagcccctgtgggacctggaactggatcttgatttcaacccagaggatcttaaatgttctctggaactgaaacaagatcttgactgtgaactagaacttcttgaagggaacctggacctagaccttgaatttgaaagggagaatgaacatgatgaagatagtgaatgtgaagattgagatattgagtgactttttctattagatttctttttattactatcgccttcttcactgacgtcaatattatattttgagagatcagcatcatcttcatcctcatcttcatctaatttatatttagaaagatcttcatcctcatcctcttcttctccctctgattctttacttcaacctcctttcatatagatgcaggaccaacaggcttccctctgcattttttctttttatatccaaactcatcatatttaccttcggattcttctcattctatatattcaacattatctttttttttttttttttttgagacagagttttgctctcgtcacccaggctggagtgcagtggcgcaatcttggctcactgcaaccttcgtttcctgggttcaagcgattctcctgcctcagcctcctgagtagctgggactacaggtgtacgccaccacgctcgattaatttttgtatttttagtagagacggggtttcaacatgttggccaggatggtctcgacctcttgacctcgtgatctgcctgcctcggcctcccaaagtgctggggttacaggcgtgagccaccgcacccagccaacattatcttttattaaagccaccaacatatctgttctttcttctaatttatcatactttggagtattacatgttacactctgatcttctggtccaattcacattactgcaagttataccttgccagtcattagcattaaataggcatcagctattttctgtaaatatttttgctattttaaaatgtgcccccagctttcatcatcttggcctgtcgttttctttttaagtattactattattaatattattaatagttgcttttacaaattatgtttttgttttcatgaaatgatattcataaaatttggtcaagttgtatttttctattttcagtgctcaccctcatacaattataccatagcttcccctttctggagataattttgattattcatgtttttattttccttatgatctccaggtaatgacttgtacttttgtggttttctattacaggctttcaaattctgattttgaatgaaacaatatactgtcctatctctttgctctgcttagatc

SEQ ID NO: 34 - DNA, 21 bp, Artificial Sequence
  Description of Artificial Sequence: Synthetic oligonucleotide
aattctccgaacgtgtcacgt

SEQ ID NO: 35 - DNA, 60 bp, Artificial Sequence
  Description of Artificial Sequence: Synthetic oligonucleotide
agcttaaaaagagaacgccacaaagatactctcttgaagtatctttgtggcgttctcggg

SEQ ID NO: 36 - DNA, 6021 bp, Artificial Sequence
  Description of Artificial Sequence: Synthetic polynucleotide
gggggaggagccaagatggccgaataggaacagctccggtctacagctcccagcgtgagcgacgcagaagacggtgatttctgcatttccatctgaggtaccgggttcatctcactagggagtgccagacagtgggcgcaggccagtgtgtgtgcgcaccgtgcgcgagccgaagcagggcgaggcattgcctcacctgggaagcgcaaggggtcagggagttccctttccgagtcaaagaaaggggtgacggacgcacctggaaaatcgggtcactcccacccgaatattgcgcttttcagaccggcttaagaaacggcgcaccacgagactatatcccacacctggctcggagggtcctacgcccacggaatctcgctgattgctagcacagcagtctgagatcaaactgcaaggcggcaacgaggctgggggaggggcgcccgccattgcccaggcttgcttaggtaaacaaagcagccgggaagctcgaactgggtggagcccaccacagctcaaggaggcctgcctgcctctgtaggctccacctctgggggcagggcacagacaaacaaaaagacagcagtaacctctgcagacttaagtgtccctgtctgacagctttgaagagagcagtggttctcccagcacgcagctggagatctgagaacgggcagactgcctcctcaagtgggtccctgactcctgacccccgagcagcctaactgggaggcaccccccagcaggggcacactgacacctcacacggcagggtattccaacagacctgcagctgagggtcctgtctgttagaaggaaaactaacaaccagaaaggacatctacaccgaaaacccatctgtacatcaccatcatcaaagaccaaaagtagataaaaccacaaagatggggaaaaaacagaacagaaaaactggaaactctaaaacgcagagcgcctctcctcctccaaaggaacgcagttcctcaccagcaacagaacaaagctggatggagaatgattttgacgagctgagagaagaaggcttcagacgatcaaattactctgagctacgggaggacattcaaaccaaaggcaaagaagttgaaaactttgaaaaaaatttagaagaatgtataactagaataaccaatacagagaagtgcttaaaggagctgatggagctgaaaaccaaggctcgagaactacgtgaagaatgcagaagcctcaggagccgatgcgatcaactggaagaaagggtatcagcaatggaagatgaaatgaatgaaatgaagcgagaagggaagtttagagaaaaaagaataaaaagaaatgagcaaagcctccaagaaatatgggactatgtgaaaagaccaaatctacgtctgattggtgtacctgaaagtgatgtggagaatggaaccaagttggaaaacactctgcaggatattatccaggagaacttccccaatctagcaaggcaggccaacgttcagattcaggaaatacagagaacgccacaaagatactcctcgagaagagcaactccaagacacataattgtcagattcaccaaagttgaaatgaaggaaaaaatgttaagggcagccagagagaaaggtcgggttaccctcaaaggaaagcccatcagactaacagcggatctctcggcagaaaccctacaagccagaagagagtgggggccaatattcaacattcttaaagaaaagaattttcaacccagaatttcatatccagccaaactaagcttcataagtgaaggagaaataaaatactttatagacaagcaaatgttgagagattttgtcaccaccaggcctgccctaaaagagctcctgaaggaagcgctaaacatggaaaggaacaaccggtaccagccgctgcaaaatcatgccaaaatgtaaagaccatcgagactaggaagaaactgcatcaactaatgagcaaaatcaccagctaacatcataatgacaggatcaaattcacacataacaatattaactttaaatataaatggactaaattctgcaattaaaagacacagactggcaagttggataaagagtcaagacccatcagtgtgctgtattcaggaaacccatctcacgtgcagagacacacataggctcaaaataaaaggatggaggaagatctaccaagccaatggaaaacaaaaaaaggcaggggttgcaatcctagtctctgataaaacagactttaaaccaacaaagatcaaaagagacaaagaaggccattacataatggtaaagggatcaattcaacaagaggagctaactatcctaaatatttatgcacccaatacaggagcacccagattcataaagcaagtcctcagtgacctacaaagagacttagactcccacacattaataatgggagactttaacaccccactgtcaacattagacagatcaacgagacagaaagtcaacaaggatacccaggaattgaactcagctctgcaccaagcagacctaatagacatctacagaactctccaccccaaatcaacagaatatacatttttttcagcaccacaccacacctattccaaaattgaccacatagttggaagtaaagctctcctcagcaaatgtaaaagaacagaaattataacaaactatctctcagaccacagtgcaatcaaactagaactcaggattaagaatctcactcaaagccgctcaactacatggaaactgaacaacctgctcctgaatgactactgggtacataacgaaatgaaggcagaaataaagatgttctttgaaaccaacgagaacaaagacaccacataccagaatctctgggacgcattcaaagcagtgtgtagagggaaatttatagcactaaatgcctacaagagaaagcaggaaagatccaaaattgacaccctaacatcacaattaaaagaactagaaaagcaagagcaaacacattcaaaagctagcagaaggcaagaaataactaaaatcagagcagaactgaaggaaatagagacacaaaaaacccttcaaaaaatcaatgaatccaggagctggttttttgaaaggatcaacaaaattgatagaccgctagcaagactaataaagaaaaaaagagagaagaatcaaatagacacaataaaaaatgataaaggggatatcaccaccgatcccacagaaatacaaactaccatcagagaatactacaaacacctctacgcaaataaactagaaaatctagaagaaatggatacattcctcgacacatacactctcccaagactaaaccaggaagaagttgaatctctgaatcgaccaataacaggctctgaaattgtggcaataatcaatagtttaccaaccaaaaagagtccaggaccagatggattcacagccgaattctaccagaggtacaaggaggaactggtaccattccttctgaaactattccaatcaatagaaaaagagggaatcctccctaactcattttatgaggccagcatcattctgataccaaagccgggcagagacacaaccaaaaaagagaattttagaccaatatccttgatgaacattgatgcaaaaatcctcaataaaatactggcaaaccgaatccagcagcacatcaaaaagcttatccaccatgatcaagtgggcttcatccctgggatgcaaggctggttcaatatacgcaaatcaataaatgtaatccagcatataaacagagccaaagacaaaaaccacatgattatctcaatagatgcagaaaaagcctttgacaaaattcaacaacccttcatgctaaaaactctcaataaattaggtattgatgggacgtatttcaaaataataagagctatctatgacaaacccacagccaatatcatactgaatgggcaaaaactggaagcattccctttgaaaaccggcacaagacagggatgccctctctcaccgctcctattcaacatagtgttggaagttctggccagggcaatcaggcaggagaaggaaataaagggtattcaattaggaaaagaggaagtcaaattgtccctgtttgcagacgacatgattgtttatctagaaaaccccatcgtctcagcccaaaatctccttaagctgataagcaacttcagcaaagtctcaggatacaaaatcaatgtacaaaaatcacaagcattcttatacaccaacaacagacaaacagagagccaaatcatgggtgaactcccattcacaattgcttcaaagagaataaaatacctaggaatccaacttacaagggatgtgaaggacctcttcaaggagaactacaaaccactgctcaaggaaataaaagaggagacaaacaaatggaagaacattccatgctcatgggtaggaagaatcaatatcgtgaaaatggccatactgcccaaggtaatttacagattcaatgccatccccatcaagctaccaatgactttcttcacagaattggaaaaaactactttaaagttcatatggaaccaaaaaagagcccgcattgccaagtcaatcctaagccaaaagaacaaagctggaggcatcacactacctgacttcaaactatactacaaggctacagtaaccaaaacagcatggtactggtaccaaaacagagatatagatcaatggaacagaacagagccctcagaaataatgccgcatatctacaactatctgatctttgacaaacctgagaaaaacaagcaatggggaaaggattccctatttaataaatggtgctgggaaaactggctagccatatgtagaaagctgaaactggatcccttccttacaccttatacaaaaatcaattcaagatggattaaagatttaaacgttaaacctaaaaccataaaaaccctagaagaaaacctaggcattaccattcaggacataggcgtgggcaaggacttcatgtccaaaacaccaaaagcaatggcaacaaaagacaaaattgacaaatgggatctaattaaactaaagagcttctgcacagcaaaagaaactaccatcagagtgaacaggcaacctacaacatgggagaaaatttttgcaacctactcatctgacaaagggctaatatccagaatctacaatgaactcaaacaaatttacaagaaaaaaacaaacaaccccatcaaaaagtgggcgaaggacatgaacagacacttctcaaaagaagacatttatgcagccaaaaaacacatgaagaaatgctcatcatcactggccatcagagaaatgcaaatcaaaaccactatgagatatcatctcacaccagttagaatggcaatcattaaaaagtcaggaaacaacaggtgctggagaggatgcggagaaataggaacacttttacactgttggtgggactgtaaactagttcaaccattgtggaagtcagtgtggcgattcctcagggatctagaactagaaataccatttgacccagccatcccattactgggtatatacccaaatgagtataaatcatgctgctataaagacacatgcacacgtatgtttattgcggcactattcacaatagcaaagacttggaaccaacccaaatgtccaacaatgatagactggattaagaaaatgtggcacatatacaccatggaatactatgcagccataaaaaatgatgagttcatatcctttgtagggacatggatgaaattggaaaccatcattctcagtaaactatcgcaagaacaaaaaaccaaacaccgcatattctcactcataggtgggaattgaacaatgagatcacatggacacaggaaggggaatatcacactctggggactgtggtggggtcgggggaggggggagggatagcattgggagatatacctaatgctagatgacacattagtgggtgcagcgcaccagcatggcacatgtatacatatgtaactaacctgcacaatgtgcacatgtaccctaaaacttagagtataataaa

SEQ ID NO: 37 - DNA, 6021 bp, Artificial Sequence
  Description of Artificial Sequence: Synthetic polynucleotide
gggggaggagccaagatggccgaataggaacagctccggtctacagctcccagcgtgagcgacgcagaagacggtgatttctgcatttccatctgaggtaccgggttcatctcactagggagtgccagacagtgggcgcaggccagtgtgtgtgcgcaccgtgcgcgagccgaagcagggcgaggcattgcctcacctgggaagcgcaaggggtcagggagttccctttccgagtcaaagaaaggggtgacggacgcacctggaaaatcgggtcactcccacccgaatattgcgcttttcagaccggcttaagaaacggcgcaccacgagactatatcccacacctggctcggagggtcctacgcccacggaatctcgctgattgctagcacagcagtctgagatcaaactgcaaggcggcaacgaggctgggggaggggcgcccgccattgcccaggcttgcttaggtaaacaaagcagccgggaagctcgaactgggtggagcccaccacagctcaaggaggcctgcctgcctctgtaggctccacctctgggggcagggcacagacaaacaaaaagacagcagtaacctctgcagacttaagtgtccctgtctgacagctttgaagagagcagtggttctcccagcacgcagctggagatctgagaacgggcagactgcctcctcaagtgggtccctgactcctgacccccgagcagcctaactgggaggcaccccccagcaggggcacactgacacctcacacggcagggtattccaacagacctgcagctgagggtcctgtctgttagaaggaaaactaacaaccagaaaggacatctacaccgaaaacccatctgtacatcaccatcatcaaagaccaaaagtagataaaaccacaaagatggggaaaaaacagaacagaaaaactggaaactctaaaacgcagagcgcctctcctcctccaaaggaacgcagttcctcaccagcaacagaacaaagctggatggagaatgattttgatgagctgagagaagaaggcttcagacgatcaaattactctgagctacgggaggacattcaaaccaaaggcaaagaagttgaaaactttgaaaaaaatttagaagaatgtataactagaataaccaatacagagaagtgcttaaaggagctgatggagctgaaaaccaaggctcgagaactacgtgaagaatgcagaagcctcaggagccgatgcgatcaactggaagaaagggtatcagcaatggaagatgaaatgaatgaaatgaagcgagaagggaagtttagagaaaaaagaataaaaagaaatgagcaaagcctccaagaaatatgggactatgtgaaaagaccaaatctacgtctgattggtgtacctgaaagtgatgtggagaatggaaccaagttggaaaacactctgcaggatattatccaggagaacttccccaatctagcaaggcaggccaacgttcagattcaggaaatacagagaacgccacaaagatactcctcgagaagagcaactccaagacacataattgtcagattcaccaaagttgaaatgaaggaaaaaatgttaagggcagccagagagaaaggtcgggttaccctcaaaggaaagcccatcagactaacagcggatctctcggcagaaaccctacaagccagaagagagtgggggccaatattcaacattcttaaagaaaagaattttcaacccagaatttcatatccagccaaactaagcttcataagtgaaggagaaataaaatactttatagacaagcaaatgttgagagattttgtcaccaccaggcctgccctaaaagagctcctgaaggaagcgctaaacatggaaaggaacaaccggtaccagccgctgcaaaatcatgccaaaatgtaaagaccatcgagactaggaagaaactgcatcaactaatgagcaaaatcaccagctaacatcataatgacaggatcaaattcacacataacaatattaactttaaatataaatggactaaattctgcaattaaaagacacagactggcaagttggataaagagtcaagacccatcagtgtgctgtattcaggaaacccatctcacgtgcagagacacacataggctcaaaataaaaggatggaggaagatctaccaagccaatggaaaacaaaaaaaggcaggggttgcaatcctagtctctgataaaacagactttaaaccaacaaagatcaaaagagacaaagaaggccattacataatggtaaagggatcaattcaacaagaggagctaactatcctaaatatttatgcacccaatacaggagcacccagattcataaagcaagtcctcagtgacctacaaagagacttagactcccacacattaataatgggagactttaacaccccactgtcaacattagacagatcaacgagacagaaagtcaacaaggatacccaggaattgaactcagctctgcaccaagcagacctaatagacatctacagaactctccaccccaaatcaacagaatatacatttttttcagcaccacaccacacctattccaaaattgaccacatagttggaagtaaagctctcctcagcaaatgtaaaagaacagaaattataacaaactatctctcagaccacagtgcaatcaaactagaactcaggattaagaatctcactcaaagccgctcaactacatggaaactgaacaacctgctcctgaatgactactgggtacataacgaaatgaaggcagaaataaagatgttctttgaaaccaacgagaacaaagacaccacataccagaatctctgggacgcattcaaagcagtgtgtagagggaaatttatagcactaaatgcctacaagagaaagcaggaaagatccaaaattgacaccctaacatcacaattaaaagaactagaaaagcaagagcaaacacattcaaaagctagcagaaggcaagaaataactaaaatcagagcagaactgaaggaaatagagacacaaaaaacccttcaaaaaatcaatgaatccaggagctggttttttgaaaggatcaacaaaattgatagaccgctagcaagactaataaagaaaaaaagagagaagaatcaaatagacacaataaaaaatgataaaggggatatcaccaccgatcccacagaaatacaaactaccatcagagaatactacaaacacctctacgcaaataaactagaaaatctagaagaaatggatacattcctcgacacatacactctcccaagactaaaccaggaagaagttgaatctctgaatcgaccaataacaggctctgaaattgtggcaataatcaatagtttaccaaccaaaaagagtccaggaccagatggattcacagccgaattctaccagaggtacaaggaggaactggtaccattccttctgaaactattccaatcaatagaaaaagagggaatcctccctaactcattttatgaggccagcatcattctgataccaaagccgggcagagacacaaccaaaaaagagaattttagaccaatatccttgatgaacattgatgcaaaaatcctcaataaaatactggcaaaccgaatccagcagcacatcaaaaagcttatccaccatgatcaagtgggcttcatccctgggatgcaaggctggttcaatatacgcaaatcaataaatgtaatccagcatataaacagagccaaagacaaaaaccacatgattatctcaatagatgcagaaaaagcctttgacaaaattcaacaacccttcatgctaaaaactctcaataaattaggtattgatgggacgtatttcaaaataataagagctatctatgacaaacccacagccaatatcatactgaatgggcaaaaactggaagcattccctttgaaaaccggcacaagacagggatgccctctctcaccgctcctattcaacatagtgttggaagttctggccagggcaatcaggcaggagaaggaaataaagggtattcaattaggaaaagaggaagtcaaattgtccctgtttgcagacgacatgattgtttatctagaaaaccccatcgtctcagcccaaaatctccttaagctgataagcaacttcagcaaagtctcaggatacaaaatcaatgtacaaaaatcacaagcattcttatacaccaacaacagacaaacagagagccaaatcatgggtgaactcccattcacaattgcttcaaagagaataaaatacctaggaatccaacttacaagggatgtgaaggacctcttcaaggagaactacaaaccactgctcaaggaaataaaagaggagacaaacaaatggaagaacattccatgctcatgggtaggaagaatcaatatcgtgaaaatggccatactgcccaaggtaatttacagattcaatgccatccccatcaagctaccaatgactttcttcacagaattggaaaaaactactttaaagttcatatggaaccaaaaaagagcccgcattgccaagtcaatcctaagccaaaagaacaaagctggaggcatcacactacctgacttcaaactatactacaaggctacagtaaccaaaacagcatggtactggtaccaaaacagagatatagatcaatggaacagaacagagccctcagaaataatgccgcatatctacaactatctgatctttgacaaacctgagaaaaacaagcaatggggaaaggattccctatttaataaatggtgctgggaaaactggctagccatatgtagaaagctgaaactggatcccttccttacaccttatacaaaaatcaattcaagatggattaaagatttaaacgttaaacctaaaaccataaaaaccctagaagaaaacctaggcattaccattcaggacataggcgtgggcaaggacttcatgtccaaaacaccaaaagcaatggcaacaaaagacaaaattgacaaatgggatctaattaaactaaagagcttctgcacagcaaaagaaactaccatcagagtgaacaggcaacctacaacatgggagaaaatttttgcaacctactcatctgacaaagggctaatatccagaatctacaatgaactcaaacaaatttacaagaaaaaaacaaacaaccccatcaaaaagtgggcgaaggacatgaacagacacttctcaaaagaagacatttatgcagccaaaaaacacatgaagaaatgctcatcatcactggccatcagagaaatgcaaatcaaaaccactatgagatatcatctcacaccagttagaatggcaatcattaaaaagtcaggaaacaacaggtgctggagaggatgcggagaaataggaacacttttacactgttggtgggactgtaaactagttcaaccattgtggaagtcagtgtggcgattcctcagggatctagaactagaaataccatttgacccagccatcccattactgggtatatacccaaatgagtataaatcatgctgctataaagacacatgcacacgtatgtttattgcggcactattcacaatagcaaagacttggaaccaacccaaatgtccaacaatgatagactggattaagaaaatgtggcacatatacaccatggaatactatgcagccataaaaaatgatgagttcatatcctttgtagggacatggatgaaattggaaaccatcattctcagtaaactatcgcaagaacaaaaaaccaaacaccgcatattctcactcataggtgggaattgaacaatgagatcacatggacacaggaaggggaatatcacactctggggactgtggtggggtcgggggaggggggagggatagcattgggagatatacctaatgctagatgacacattagtgggtgcagcgcaccagcatggcacatgtatacatatgtaactaacctgcacaatgtgcacatgtaccctaaaacttagagtataataaa

SEQ ID NO: 38 - DNA, 6022 bp, Artificial Sequence
  Description of Artificial Sequence: Synthetic polynucleotide
gggggaggagccaagatggccgaataggaacagctccggtctacagctcccagcgtgagcgacgcagaagacgggtgatttctgcatttccatctgaggtaccgggttcatctcactagggagtgccagacagtgggcgcaggccagtgtgtgtgcgcaccgtgcgcgagccgaagcagggcgaggcattgcctcacctgggaagcgcaaggggtcagggagttccctttccgagtcaaagaaaggggtgacggacgcacctggaaaatcgggtcactcccacccgaatattgcgcttttcagaccggcttaagaaacggcgcaccacgagactatatcccacacctggctcagagggtcctacgcccacggaatctcgctgattgctagcacagcagtctgagatcaaactgcaaggcggcaacgaggctgggggaggggcgcccgccattgcccaggcttgcttaggtaaacaaagcagccgggaagctcgaactgggtggagcccaccacagctcaaggaggcctgcctgcctctgtaggctccacctctgggggcagggcacagacaaacaaaaagacagcagtaacctctgcagacttaagtgtccctgtctgacagctttgaagagagcagtggttctcccagcacgcagctggagatctgagaacgggcagactgcctcctcaagtgggtccctgacccctgacccccgagcagcctaactgggaggcaccccccagcaggggcacactgacacctcacacggcagggtattccaacagacctgcagctgagggtcctgtctgttagaaggaaaactaacaaccagaaaggacatctacaccgaaaacccatctgtacatcaccatcatcaaagaccaaaagtagataaaaccacaaagatggggaaaaaacagaacagaaaaactggaaactctaaaacgcagagcgcctctcctcctccaaaggaacgcagttcctcaccagcaacagaacaaagctggatggagaatgattttgacgagctgagagaagaaggcttcagacgatcaaattactctgagctacgggaggacattcaaaccaaaggcaaagaagttgaaaactttgaaaaaaatttagaagaatgtataactagaataaccaatacagagaagtgcttaaaggagctgatggagctgaaaaccaaggctcgagaactacgtgaagaatgcagaagcctcaggagccgatgcgatcaactggaagaaagggtatcagcaatggaagatgaaatgaatgaaatgaagcgagaagggaagtttagagaaaaaagaataaaaagaaatgagcaaagcctccaagaaatatgggactatgtgaaaagaccaaatctacgtctgattggtgtacctgaaagtgatgtggagaatggaaccaagttggaaaacactctgcaggatattatccaggagaacttccccaatctagcaaggcaggccaacgttcagattcaggaaatacagagaacgccacaaagatactcctcgagaagagcaactccaagacacataattgtcagattcaccaaagttgaaatgaaggaaaaaatgttaagggcagccagagagaaaggtcgggttaccctcaaaggaaagcccatcagactaacagcggatctctcggcagaaaccctacaagccagaagagagtgggggccaatattcaacattcttaaagaaaagaattttcaacccagaatttcatatccagccaaactaagcttcataagtgaaggagaaataaaatactttatagacaagcaaatgctgagagattttgtcaccaccaggcctgccctaaaagagctcctgaaggaagcgctaaacatggaaaggaacaaccggtaccagccgctgcaaaatcatgccaaaatgtaaagaccatcgagactaggaagaaactgcatcaactaatgagcaaaatcaccagctaacatcataatgacaggatcaaattcacacataacaatattaactttaaatataaatggactaaattctgcaattaaaagacacagactggcaagttggataaagagtcaagacccatcagtgtgctgtattcaggaaacccatctcacgtgcagagacacacataggctcaaaataaaaggatggaggaagatctaccaagccaatggaaaacaaaaaaaggcaggggttgcaatcctagtctctgataaaacagactttaaaccaacaaagatcaaaagagacaaagaaggccattacataatggtaaagggatcaattcaacaagaggagctaactatcctaaatatttatgcacccaatacaggagcacccagattcataaagcaagtcctcagtgacctacaaagagacttagactcccacacattaataatgggagactttaacaccccactgtcaacattagacagatcaacgagacagaaagtcaacaaggatacccaggaattgaactcagctctgcaccaagcagacctaatagacatctacagaactctccaccccaaatcaacagaatatacatttttttcagcaccacaccacacctattccaaaattgaccacatagttggaagtaaagctctcctcagcaaatgtaaaagaacagaaattataacaaactatctctcagaccacagtgcaatcaaactagaactcaggattaagaatctcactcaaagccgctcaactacatggaaactgaacaacctgctcctgaatgactactgggtacataacgaaatgaaggcagaaataaagatgttctttgaaaccaacgagaacaaagacaccacataccagaatctctgggacgcattcaaagcagtgtgtagagggaaatttatagcactaaatgcctacaagagaaagcaggaaagatccaaaattgacaccctaacatcacaattaaaagaactagaaaagcaagagcaaacacattcaaaagctagcagaaggcaagaaataactaaaatcagagcagaactgaaggaaatagagacacaaaaaacccttcaaaaaatcaatgaatccaggagctggttttttgaaaggatcaacaaaattgatagaccgctagcaagactaataaagaaaaaaagagagaagaatcaaatagacacaataaaaaatgataaaggggatatcaccaccgatcccacagaaatacaaactaccatcagagaatactacaaacacctctacgcaaataaactagaaaatctagaagaaatggatacattcctcgacacatacactctcccaagactaaaccaggaagaagttgaatctctgaatagaccaataacaggctctgaaattgtggcaataatcaatagtttaccaaccaaaaagagtccaggaccagatggattcacagccgaattctaccagaggtacaaggaggaactggtaccattccttctgaaactattccaatcaatagaaaaagagggaatcctccctaactcattttatgaggccagcatcattctgataccaaagccgggcagagacacaaccaaaaaagagaattttagaccaatatccttgatgaacattgatgcaaaaatcctcaataaaatactggcaaaccgaatccagcagcacatcaaaaagcttatccaccatgatcaagtgggcttcatccctgggatgcaaggctggttcaatatacgcaaatcaataaatgtaatccagcatataaacagagccaaagacaaaaaccacatgattatctcaatagatgcagaaaaagcctttgacaaaattcaacaacccttcatgctaaaaactctcaataaattaggtattgatgggacgtatttcaaaataataagagctatctatgacaaacccacagccaatatcatactgaatgggcaaaaactggaagcattccctttgaaaactggcacaagacagggatgccctctctcaccgctcctattcaacatagtgttggaagttctggccagggcaatcaggcaggagaaggaaataaagggtattcaattaggaaaagaggaagtcaaattgtccctgtttgcagacgacatgattgtttatctagaaaaccccatcgtctcagcccaaaatctccttaagctgataagcaacttcagcaaagtctcaggatacaaaatcaatgtacaaaaatcacaagcattcttatacaccaacaacagacaaacagagagccaaatcatgggtgaactcccattcacaattgcttcaaagagaataaaatacctaggaatccaacttacaagggatgtgaaggacctcttcaaggagaactacaaaccactgctcaaggaaataaaagaggacacaaacaaatggaagaacattccatgctcatgggtaggaagaatcaatatcgtgaaaatggccatactgcccaaggtaatttacagattcaatgccatccccatcaagctaccaatgactttcttcacagaattggaaaaaactactttaaagttcatatggaaccaaaaaagagcccgcattgccaagtcaatcctaagccaaaagaacaaagctggaggcatcacactacctgacttcaaactatactacaaggctacagtaaccaaaacagcatggtactggtaccaaaacagagatatagatcaatggaacagaacagagccctcagaaataatgccgcatatctacaactatctgatctttgacaaacctgagaaaaacaagcaatggggaaaggattccctatttaataaatggtgctgggaaaactggctagccatatgtagaaagctgaaactggatcccttccttacaccttatacaaaaatcaattcaagatggattaaagatttaaacgttagacctaaaaccataaaaaccctagaagaaaacctaggcattaccattcaggacataggcgtgggcaaggacttcatgtccaaaacaccaaaagcaatggcaacaaaagccaaaattgacaaatgggatctaattaaactaaagagcttctgcacagcaaaagaaactaccatcagagtgaacaggcaacctacaacatgggagaaaattttcgcaacctactcatctgacaaagggctaatatccagaatctacaatgaactcaaacaaatttacaagaaaaaaacaaacaaccccatcaaaaagtgggcgaaggacatgaacagacacttctcaaaagaagacatttatgcagccaaaaaacacatgaagaaatgctcatcatcactggccatcagagaaatgcaaatcaaaaccactatgagatatcatctcacaccagttagaatggcaatcattaaaaagtcaggaaacaacaggtgctggagaggatgtggagaaataggaacacttttacactgttggtgggactgtaaactagttcaaccattgtggaagtcagtgtggcgattcctcagggatctagaactagaaataccatttgacccagccatcccattactgggtatatacccaaaggactataaatcatgctgctataaagacacatgcacacgtatgtttattgcggcactattcacaatagcaaagacttggaaccaacccaaatgtccaacaatgatagactggattaagaaaatgtggcacatatacaccatggaatactatgcagccataaaaaatgatgagttcatatcctttgtagggacatggatgaaattggaaaccatcattctcagtaaactatcgcaagaacaaaaaaccaaacaccgcatattctcactcataggtgggaattgaacaatgagatcacatggacacaggaaggggaatatcacactctggggactgtggtggggtcgggggaggggggagggatagcattgggagatatacctaatgctagatgacacattagtgggtgcagcgcaccagcatggcacatgtatacatatgtaactaacctgcacaatgtgcacatgtaccctaaaacttagagtataataaa

SEQ ID NO: 39 - RNA, 20 nt, Artificial Sequence
  Description of Artificial Sequence: Synthetic oligonucleotide
agaaaugagcaaagccucca

SEQ ID NO: 40 - RNA, 20 nt, Artificial Sequence
  Description of Artificial Sequence: Synthetic oligonucleotide
gccugguggugacaaaaucu

SEQ ID NO: 41 - RNA, 20 nt, Artificial Sequence
  Description of Artificial Sequence: Synthetic oligonucleotide
uaagggcagccagagagaaa

SEQ ID NO: 42 - RNA, 20 nt, Artificial Sequence
  Description of Artificial Sequence: Synthetic oligonucleotide
uccagcagcacaucaaaaag

SEQ ID NO: 43 - RNA, 20 nt, Artificial Sequence
  Description of Artificial Sequence: Synthetic oligonucleotide
ccaguuuuugcccauucagu

SEQ ID NO: 44 - RNA, 20 nt, Artificial Sequence
  Description of Artificial Sequence: Synthetic oligonucleotide
ugacaaacccacagccaaua

SEQ ID NO: 45 - protein, 338 aa, Homo sapiens
MGKKQNRKTGNSKTQSASPPPKERSSSPATEQSWMENDFDELREEGFRRSNYSELREDIQTKGKEVENFEKNLEECITRITNTEKCLKELMELKTKARELREECRSLRSRCDQLEERVSAMEDEMNEMKREGKFREKRIKRNEQSLQEIWDYVKRPNLRLIGVPESDVENGTKLENTLQDIIQENFPNLARQANVQIQEIQRTPQRYSSRRATPRHIIVRFTKVEMKEKMLRAAREKGRVTLKGKPIRLTADLSAETLQARREWGPIFNILKEKNFQPRISYPAKLSFISEGEIKYFIDKQMLRDFVTTRPALKELLKEALNMERNNRYQPLQNHAKM

SEQ ID NO: 46 - protein, 1275 aa, Homo sapiens [sequence omitted]

SEQ ID NO: 47 - RNA, 21 nt, Artificial Sequence
  Description of Artificial Sequence: Synthetic oligonucleotide
aagagcaacuccaagacacau
